(19) United States
(12) Patent Application Publication
(10) Pub. No.: US 2022/0025363 A1
(43) Pub. Date: Jan. 27, 2022

(54) SYSTEMS AND METHODS FOR THE TREATMENT OF HEMOGLOBINOPATHIES

(71) Applicant: EDITAS MEDICINE, INC., Cambridge, MA (US)

(72) Inventors: Jennifier Leah GORI, Jamaica Plain, MA (US); Edouard AUPEPIN DE LAMOTHE-DREUZY, Boston, MA (US); Jack HEATH, Winchester, MA (US); John Anthony ZURIS, Boston, MA (US); KaiHsin CHANG, Medfield, MA (US)

(73) Assignee: EDITAS MEDICINE, INC., Cambridge, MA (US)

(21) Appl. No.: 17/115,791

(22) Filed: Dec. 8, 2020

Related U.S. Application Data
(63) Continuation-in-part of application No. 17/019,154, filed on Sep. 11, 2020.
Application No. 17/019,154 is a continuation of application No. PCT/US2019/022374, filed on Mar. 14, 2019.
(60) Provisional application No. 62/643,168, filed on Mar. 14, 2018.
(60) Provisional application No. 62/767,488, filed on Nov. 14, 2018.
(60) Provisional application No. 62/773,073, filed on Nov. 29, 2018.
(60) Provisional application No. 62/945,190, filed on Dec. 8, 2019.
(60) Provisional application No. 63/115,518, filed on Nov. 18, 2020.

(51) Int. Cl. C12N 15/11; C12N 15/10; C12N 9/22

(52) U.S. Cl. CPC C12N 15/111; C12N 15/102; C12N 9/22; C12N 2310/315; C12N 2510/00; C12N 2740/15041; C12N 2310/20

(57) ABSTRACT

Genome editing systems, guide RNAs, and CRISPR-mediated methods are provided for altering portions of the HBG1 and HBG2 loci, portions of the erythroid specific enhancer of the BCL11A gene, or a combination thereof, in cells and increasing expression of fetal hemoglobin.

### REFERENCE TO RELATED APPLICATIONS

[0001] This application is a Continuation-in-Part of U.S. application Ser. No. 17/019,154, filed Sep. 11, 2020, which is a continuation of International Patent Application No. PCT/US19/22374, filed Mar. 14, 2019, which claims priority to U.S. Provisional Patent Application No. 62/643,168, filed Mar. 14, 2018, U.S. Provisional Patent Application No. 62/767,488, filed Nov. 14, 2018, and U.S. Provisional Patent Application No. 62/773,073, filed Nov. 29, 2018. This application also claims priority to U.S. Provisional Patent Application No. 62/945,190, filed Dec. 8, 2019, and U.S. Provisional Patent Application No. 63/115,518, filed Nov. 18, 2020, all of which are incorporated herein by reference in their entirety, including drawings.

### SEQUENCE LISTING

[0002] This application contains a Sequence Listing, which was submitted in ASCII format via EFS-Web, and is hereby incorporated by reference in its entirety. The ASCII copy, created on Dec. 8, 2020, is named SequenceListing.txt and is 815 KB in size.

### FIELD

[0003] This disclosure relates to genome editing systems and methods for altering a target nucleic acid sequence, or modulating expression of a target nucleic acid sequence, and applications thereof in connection with the alteration of genes encoding hemoglobin subunits and/or treatment of hemoglobinopathies.

### BACKGROUND

[0004] Hemoglobin (Hb) carries oxygen in erythrocytes or red blood cells (RBCs) from the lungs to tissues. During prenatal development and until shortly after birth, hemoglobin is present in the form of fetal hemoglobin (HbF), a tetrameric protein composed of two alpha (α)-globin chains and two gamma (γ)-globin chains. HbF is largely replaced by adult hemoglobin (HbA), a tetrameric protein in which the γ-globin chains of HbF are replaced with beta (β)-globin chains, through a process known as globin switching. The average adult makes less than 1% HbF out of total hemoglobin (Thein 2009). The α-hemoglobin gene is located on chromosome 16, while the β-hemoglobin gene (HBB), A gamma (Aγ)-globin chain (HBG1, also known as gamma globin A), and G gamma (Gγ)-globin chain (HBG2, also known as gamma globin G) are located on chromosome 11 within the globin gene cluster (also referred to as the globin locus).

[0005] Mutations in HBB can cause hemoglobin disorders (i.e., hemoglobinopathies) including sickle cell disease (SCD) and beta-thalassemia (β-Thal). Approximately 93,000 people in the United States are diagnosed with a hemoglobinopathy. Worldwide, 300,000 children are born with hemoglobinopathies every year (Angastiniotis 1998). Because these conditions are associated with HBB mutations, their symptoms typically do not manifest until after globin switching from HbF to HbA.

[0006] SCD is the most common inherited hematologic disease in the United States, affecting approximately 80,000 people (Brousseau 2010). SCD is most common in people of African ancestry, for whom the prevalence of SCD is 1 in 500. In Africa, the prevalence of SCD is 15 million (Aliyu 2008). SCD is also more common in people of Indian, Saudi Arabian and Mediterranean descent. In those of Hispanic-American descent, the prevalence of sickle cell disease is 1 in 1,000 (Lewis 2014).

[0007] SCD is caused by a single homozygous mutation in the HBB gene, c.17A>T (HbS mutation). The sickle mutation is a point mutation (GAG>GTG) on HBB that results in substitution of valine for glutamic acid at amino acid position 6 in exon 1. The valine at position 6 of the β-hemoglobin chain is hydrophobic and causes a change in conformation of the β-globin protein when it is not bound to oxygen. This change of conformation causes HbS proteins to polymerize in the absence of oxygen, leading to deformation (i.e., sickling) of RBCs. SCD is inherited in an autosomal recessive manner, so that only patients with two HbS alleles have the disease. Heterozygous subjects have sickle cell trait, and may suffer from anemia and/or painful crises if they are severely dehydrated or oxygen deprived.

[0008] Sickle shaped RBCs cause multiple symptoms, including anemia, sickle cell crises, vaso-occlusive crises, aplastic crises, and acute chest syndrome. Sickle shaped RBCs are less elastic than wild-type RBCs and therefore cannot pass as easily through capillary beds and cause occlusion and ischemia (i.e., vaso-occlusion). Vaso-occlusive crisis occurs when sickle cells obstruct blood flow in the capillary bed of an organ leading to pain, ischemia, and necrosis. These episodes typically last 5-7 days. The spleen plays a role in clearing dysfunctional RBCs, and is therefore typically enlarged during early childhood and subject to frequent vaso-occlusive crises. By the end of childhood, the spleen in SCD patients is often infarcted, which leads to autosplenectomy. Hemolysis is a constant feature of SCD and causes anemia. Sickle cells survive for 10-20 days in circulation, while healthy RBCs survive for 90-120 days. SCD subjects are transfused as necessary to maintain adequate hemoglobin levels. Frequent transfusions place subjects at risk for infection with HIV, Hepatitis B, and Hepatitis C. Subjects may also suffer from acute chest crises and infarcts of extremities, end organs, and the central nervous system.

[0009] Subjects with SCD have decreased life expectancies. The prognosis for patients with SCD is steadily improving with careful, life-long management of crises and anemia. As of 2001, the average life expectancy of subjects with sickle cell disease was the mid-to-late 50's. Current treatments for SCD involve hydration and pain management during crises, and transfusions as needed to correct anemia.

[0010] Thalassemias (e.g., β-Thal, δ-Thal, and β/δ-Thal) cause chronic anemia. β-Thal is estimated to affect approximately 1 in 100,000 people worldwide. Its prevalence is higher in certain populations, including those of European descent, where its prevalence is approximately 1 in 10,000. β-Thal major, the more severe form of the disease, is life-threatening unless treated with lifelong blood transfusions and chelation therapy. In the United States, there are approximately 3,000 subjects with β-Thal major. β-Thal intermedia does not require blood transfusions, but it may cause growth delay and significant systemic abnormalities, and it frequently requires lifelong chelation therapy. Although HbA makes up the majority of hemoglobin in adult RBCs, approximately 3% of adult hemoglobin is in the form of HbA2, an HbA variant in which the two γ-globin chains are replaced with two delta (Δ)-globin chains. δ-Thal is associated with mutations in the A hemoglobin gene (HBD) that cause a loss of HBD expression. Co-inheritance of the HBD mutation can mask a diagnosis of β-Thal (i.e., β/δ-Thal) by decreasing the level of HbA2 to the normal range (Bouva 2006). β/δ-Thal is usually caused by deletion of the HBB and HBD sequences in both alleles. In homozygous (δo/δo βo/βo) patients, HBG is expressed, leading to production of HbF alone.

[0011] Like SCD, β-Thal is caused by mutations in the HBB gene. The most common HBB mutations leading to β-Thal are: c.−136C>G, c.92+1G>A, c.92+6T>C, c.93-21G>A, c.118C>T, c.316−106C>G, c.25_26delAA, c.27_28insG, c.92+5G>C, c.118C>T, c.135delC, c.315+1G>A, c.−78A>G, c.52A>T, c.59A>G, c.92+5G>C, c.124_127delTTCT, c.316−197C>T, c.−78A>G, c.52A>T, c.124_127delTTCT, c.316−197C>T, c.−138C>T, c.−79A>G, c.92+5G>C, c.75T>A, c.316−2A>G, and c.316−2A>C. These and other mutations associated with β-Thal cause mutated or absent β-globin chains, which causes a disruption of the normal Hb α-hemoglobin to 0-hemoglobin ratio. Excess α-globin chains precipitate in erythroid precursors in the bone marrow.

[0012] In β-Thal major, both alleles of HBB contain nonsense, frameshift, or splicing mutations that leads to complete absence of β-globin production (denoted β⁰/β⁰). β-Thal major results in severe reduction in β-globin chains, leading to significant precipitation of α-globin chains in RBCs and more severe anemia.

[0013] β-Thal intermedia results from mutations in the 5′ or 3′ untranslated region of HBB, mutations in the promoter region or polyadenylation signal of HBB, or splicing mutations within the HBB gene. Patient genotypes are denoted βo/β+ or β+/β+. Do represents absent expression of a β-globin chain; β+ represents a dysfunctional but present β-globin chain. Phenotypic expression varies among patients. Since there is some production of β-globin, β-Thal intermedia results in less precipitation of α-globin chains in the erythroid precursors and less severe anemia than β-Thal major. However, there are more significant consequences of erythroid lineage expansion secondary to chronic anemia.

[0014] Subjects with β-Thal major present between the ages of 6 months and 2 years, and suffer from failure to thrive, fevers, hepatosplenomegaly, and diarrhea. Adequate treatment includes regular transfusions. Therapy for β-Thal major also includes splenectomy and treatment with hydroxyurea. If patients are regularly transfused, they will develop normally until the beginning of the second decade. At that time, they require chelation therapy (in addition to continued transfusions) to prevent complications of iron overload. Iron overload may manifest as growth delay or delay of sexual maturation. In adulthood, inadequate chelation therapy may lead to cardiomyopathy, cardiac arrhythmias, hepatic fibrosis and/or cirrhosis, diabetes, thyroid and parathyroid abnormalities, thrombosis, and osteoporosis. Frequent transfusions also put subjects at risk for infection with HIV, hepatitis B and hepatitis C.

[0015] β-Thal intermedia subjects generally present between the ages of 2-6 years. They do not generally require blood transfusions. However, bone abnormalities occur due to chronic hypertrophy of the erythroid lineage to compensate for chronic anemia. Subjects may have fractures of the long bones due to osteoporosis. Extramedullary erythropoiesis is common and leads to enlargement of the spleen, liver, and lymph nodes. It may also cause spinal cord compression and neurologic problems. Subjects also suffer from lower extremity ulcers and are at increased risk for thrombotic events, including stroke, pulmonary embolism, and deep vein thrombosis. Treatment of β-Thal intermedia includes splenectomy, folic acid supplementation, hydroxyurea therapy, and radiotherapy for extramedullary masses. Chelation therapy is used in subjects who develop iron overload.

[0016] Life expectancy is often diminished in β-Thal patients. Subjects with β-Thal major who do not receive transfusion therapy generally die in their second or third decade. Subjects with β-Thal major who receive regular transfusions and adequate chelation therapy can live into their fifth decade and beyond. Cardiac failure secondary to iron toxicity is the leading cause of death in β-Thal major subjects due to iron toxicity.

[0017] A variety of new treatments are currently in development for SCD and β-Thal. Delivery of an anti-sickling HBB gene via gene therapy is currently being investigated in clinical trials. However, the long-term efficacy and safety of this approach is unknown. Transplantation with hematopoietic stem cells (HSCs) from an HLA-matched allogeneic stem cell donor has been demonstrated to cure SCD and β-Thal, but this procedure involves risks including those associated with ablation therapy, which is required to prepare the subject for transplant, increases risk of life-threatening opportunistic infections, and risk of graft vs. host disease after transplantation. In addition, matched allogeneic donors often cannot be identified. Thus, there is a need for improved methods of managing these and other hemoglobinopathies.

### SUMMARY

[0018] Provided herein in certain embodiments are first populations of modified cells comprising a plurality of modified CD34+ or hematopoietic stem cells with one or more indels in an HBG gene promoter. In certain of these embodiments, the plurality of modified cells include an indel in a CCAAT box target region.

[0019] In certain embodiments of the first populations of modified cells provided herein, one or more of the cells in the plurality of modified cells include a HBG1/2 c.−104 to −121 deletion in a HBG1 promoter, an HBG2 promoter, or both. In certain of these embodiments, HBG1/2 c.−104 to −121 deletions make up 1% or more, 1.5% or more, 2% or more, 2.5% or more. 3% or more, 3.5% or more, 4% or more, 4.5% or more, 5% or more, 5.5% or more, 6% or more, 6.5% or more, 7% or more, 7.5% or more, 8% or more, 8.5% or more, 9% or more, 9.5% or more, 10% or more, 10.5% or more, 11% or more, 11.5% or more, 12% or more, 12.5% or more, 13% or more, 13.5% or more, 14% or more, 14.5% or more, 15% or more, or 15.5% or more of the indels in the plurality of modified cells as a whole. In certain of these embodiments, HBG1/2 c.−104 to −121 deletions make up less than 25% of the indels in the plurality of modified cells as a whole.

[0020] In certain embodiments of the first populations of modified cells provided herein, 60% or more, 65% or more, 70% or more, 75% or more, 80% or more, 85% or more, 90% or more, or 95% or more of the indels in the plurality of modified cells as a whole are deletions of at least 4 base pairs.

[0021] In certain embodiments of the first populations of modified cells provided herein, 25% or more, 30% or more, 35% or more, 40% or more, 45% or more, 50% or more, 55% or more, 60% or more, or 65% or more of the indels in the plurality of modified cells as a whole are deletions of at least 4 base pairs introduced by a repair mechanism other than microhomology-mediated end joining (MMEJ) repair.

[0022] In certain embodiments of the first populations of modified cells provided herein, 25% or more, 30% or more, 35% or more, 40% or more, 45% or more, 50% or more, 55% or more, 60% or more, or 65% or more of the indels in the plurality of modified cells as a whole are deletions of at least 4 base pairs introduced by non-homologous end joining (NHEJ) repair, e.g., canonical NHEJ repair.

[0023] In certain embodiments of the first populations of modified cells provided herein, 50% or more, 55% or more, 60% or more, 65% or more, 70% or more, 75% or more, 80% or more, 85% or more, 90% or more, or 92% or more of the indels in the plurality of modified cells as a whole are deletions of 1 to 25 base pairs.

[0024] In certain embodiments of the first populations of modified cells provided herein, 50% or more, 55% or more, 60% or more, 65% or more, 70% or more, 75% or more, 80% or more, or 85% or more of the indels in the plurality of modified cells as a whole are deletions of 3 to 25 base pairs.

[0025] In certain embodiments of the first populations of modified cells provided herein, 50% or more, 55% or more, 60% or more, 65% or more, 70% or more, 75% or more, or 80% or more of the indels in the plurality of modified cells as a whole are deletions of 4 to 25 base pairs.

[0026] In certain embodiments of the first populations of modified cells provided herein, 50% or more, 55% or more, 60% or more, 65% or more, 70% or more, or 72% or more of the indels in the plurality of modified cells as a whole are deletions of 5 to 25 base pairs.

[0027] In certain embodiments of the first populations of modified cells provided herein, the modified cells are produced by delivering a first RNP complex including a first gRNA comprising a first gRNA targeting domain and a Cpf1 RNA-guided nuclease or a modified Cpf1 RNA-guided nuclease to a first population of unmodified cells comprising a plurality of unmodified CD34+ or hematopoietic stem cells to generate indels. In certain of these embodiments, the first RNP complex is delivered to the first population of unmodified cells by electroporation. In certain embodiments, the first population of unmodified cells is from a subject having sickle cell disease. In certain embodiments, the first gRNA includes a 5′ end and a 3′ end, with a DNA extension at the 5′ end and a 2′-O-methyl-3′-phosphorothioate modification at the 3′ end. In certain of these embodiments, the DNA extension at the 5′ end comprises a sequence set forth in any of SEQ ID NOs:1235-1250. In certain embodiments, the first gRNA targeting domain comprises the sequence set forth in SEQ ID NO: 1254. In certain embodiments, the first gRNA comprises the sequence set forth in SEQ ID NO:1051. In certain embodiments, the modified Cpf1 RNA-guided nuclease comprises the sequence set forth in SEQ ID NO: 1097. In certain embodiments, the first population of modified cells has higher fetal hemoglobin (HbF) levels than the first population of unmodified cells.

[0028] In certain embodiments of the first populations of modified cells provided herein, one or more of the cells in the plurality of modified cells include (a) a HBG1/2 c.−104 to −121 deletion in a HBG1 promoter, an HBG2 promoter, or both; (b) a HBG1/2 c.−110 to −115 deletion in a HBG1 promoter, an HBG2 promoter, or both; (c) a HBG1/2 c.−112 to −115 deletion in a HBG1 promoter, an HBG2 promoter, or both; (d) a HBG1/2 c.−113 to −115 deletion in a HBG1 promoter, an HBG2 promoter, or both; (e) a HBG1/2 c.−111 to −115 deletion in a HBG1 promoter, an HBG2 promoter, or both; (f) a HBG1/2 c.−111 to −117 deletion in a HBG1 promoter, an HBG2 promoter, or both; (g) a HBG1/2 c.−102 to −114 deletion in a HBG1 promoter, an HBG2 promoter, or both; (h) a HBG1/2 c.−114 to −118 deletion in a HBG1 promoter, an HBG2 promoter, or both; (i) a HBG1/2 c.−112 to −116 deletion in a HBG1 promoter, an HBG2 promoter, or both; or (j) a HBG1/2 c.−113 to −117 deletion in a HBG1 promoter, an HBG2 promoter, or both.

[0029] In certain embodiments of the first populations of modified cells provided herein, the plurality of modified cells as a whole includes (a) a HBG1/2 c.−104 to −121 deletion in a HBG1 promoter, an HBG2 promoter, or both and (b) a HBG1/2 c.−110 to −115 deletion in a HBG1 promoter, an HBG2 promoter, or both. In certain embodiments, HBG1/2 c.−104 to −121 deletions make up 1% or more, 1.5% or more, 2% or more, 2.5% or more. 3% or more, 3.5% or more, 4% or more, 4.5% or more, 5% or more, 5.5% or more, 6% or more, 6.5% or more, 7% or more, 7.5% or more, 8% or more, 8.5% or more, 9% or more, 9.5% or more, 10% or more, 10.5% or more, 11% or more, 11.5% or more, 12% or more, 12.5% or more, 13% or more, 13.5% or more, 14% or more, 14.5% or more, or 15% or more of the indels in the plurality of modified cells as a whole. In certain embodiments, HBG1/2 c.−104 to −121 deletions make up 1% to 15.5% of the indels in the plurality of modified cells as a whole. In certain embodiments, HBG1/2 c.−110 to −115 deletions make up 0.5% or more, 1% or more, 1.5% or more, 2% or more, 2.5% or more. 3% or more, 3.5% or more, 4% or more, 4.5% or more, 5% or more, or 5.5% or more of the indels in the plurality of modified cells as a whole. In certain embodiments, HBG1/2 c.−110 to −115 deletions make up 0.5% to 6% of the indels in the plurality of modified cells as a whole.

[0030] In certain embodiments of the first populations of modified cells provided herein, the plurality of modified cells as a whole include (a) a HBG1/2 c.−104 to −121 deletion in a HBG1 promoter, an HBG2 promoter, or both; (b) a HBG1/2 c.−110 to −115 deletion in a HBG1 promoter, an HBG2 promoter, or both; (c) a HBG1/2 c.−112 to −115 deletion in a HBG1 promoter, an HBG2 promoter, or both; (d) a HBG1/2 c.−113 to −115 deletion in a HBG1 promoter, an HBG2 promoter, or both; (e) a HBG1/2 c.−111 to −115 deletion in a HBG1 promoter, an HBG2 promoter, or both; (f) a HBG1/2 c.−111 to −117 deletion in a HBG1 promoter, an HBG2 promoter, or both; (g) a HBG1/2 c.−102 to −114 deletion in a HBG1 promoter, an HBG2 promoter, or both; (h) a HBG1/2 c.−114 to −118 deletion in a HBG1 promoter, an HBG2 promoter, or both; (i) a HBG1/2 c.−112 to −116 deletion in a HBG1 promoter, an HBG2 promoter, or both; and (j) a HBG1/2 c.−113 to −117 deletion in a HBG1 promoter, an HBG2 promoter, or both. In certain embodiments, the HBG1/2 c.−104 to −121 deletions make up 1% or more, 1.5% or more, 2% or more, 2.5% or more. 3% or more, 3.5% or more, 4% or more, 4.5% or more, 5% or more, 5.5% or more, 6% or more, 6.5% or more, 7% or more, 7.5% or more, 8% or more, 8.5% or more, 9% or more, 9.5% or more, 10% or more, 10.5% or more, 11% or more, 11.5% or more, 12% or more, 12.5% or more, 13% or more, 13.5% or more, 14% or more, 14.5% or more, or 15% or more of the indels in the plurality of modified cells as a whole. In certain embodiments, the HBG1/2 c.−104 to −121 deletions make up 1% to 15.5% of the indels in the plurality of modified cells as a whole. In certain embodiments, the HBG1/2 c.−110 to −115 deletions make up 0.5% or more, 1% or more, 1.5% or more, 2% or more, 2.5% or more. 3% or more, 3.5% or more, 4% or more, 4.5% or more, 5% or more, or 5.5% or more of the indels in the plurality of modified cells as a whole. In certain embodiments, HBG1/2 c.−110 to −115 deletions make up 0.5% to 6% of the indels in the plurality of modified cells as a whole. In certain embodiments, the HBG1/2 c.−112 to −115 deletions make up 0.5% or more, 1% or more, 1.5% or more, 2% or more, 2.5% or more. 3% or more, 3.5% or more, 4% or more, 4.5% or more, 5% or more, or 5.5% or more of the indels in the plurality of modified cells as a whole. In certain embodiments, HBG1/2 c.−112 to −115 deletions make up 0.5% to 6% of the indels in the plurality of modified cells as a whole. In certain embodiments, the HBG1/2 c.−113 to −115 deletions make up 0.5% or more, 1% or more, 1.5% or more, 2% or more, 2.5% or more. 3% or more, 3.5% or more, 4% or more, 4.5% or more, 5% or more, or 5.5% or more of the indels in the plurality of modified cells as a whole. In certain embodiments, HBG1/2 c.−113 to −115 deletions make up 0.5% to 6% of the indels in the plurality of modified cells as a whole. In certain embodiments, the HBG1/2 c.−111 to −115 deletions make up 0.5% or more, 1% or more, 1.5% or more, 2% or more, 2.5% or more. 3% or more, 3.5% or more, 4% or more, 4.5% or more, 5% or more, or 5.5% or more of the indels in the plurality of modified cells as a whole. In certain embodiments, HBG1/2 c.−111 to −115 deletions make up 0.5% to 6% of the indels in the plurality of modified cells as a whole. In certain embodiments, the HBG1/2 c.−111 to −117 deletions make up 0.5% or more, 1% or more, 1.5% or more, 2% or more, 2.5% or more. 3% or more, 3.5% or more, 4% or more, 4.5% or more, 5% or more, or 5.5% or more of the indels in the plurality of modified cells as a whole. In certain embodiments, HBG1/2 c.−111 to −117 deletions make up 0.5% to 6% of the indels in the plurality of modified cells as a whole. In certain embodiments, the HBG1/2 c.−102 to −114 deletions make up 0.5% or more, 1% or more, 1.5% or more, 2% or more, 2.5% or more. 3% or more, 3.5% or more, 4% or more, 4.5% or more, 5% or more, or 5.5% or more of the indels in the plurality of modified cells as a whole. In certain embodiments, HBG1/2 c.−102 to −114 deletions make up 0.5% to 6% of the indels in the plurality of modified cells as a whole. In certain embodiments, the HBG1/2 c.−114 to −118 deletions make up 0.5% or more, 1% or more, 1.5% or more, 2% or more, 2.5% or more. 3% or more, 3.5% or more, 4% or more, 4.5% or more, 5% or more, or 5.5% or more of the indels in the plurality of modified cells as a whole. In certain embodiments, HBG1/2 c.−114 to −118 deletions make up 0.5% to 6% of the indels in the plurality of modified cells as a whole. In certain embodiments, the HBG1/2 c.−112 to −116 deletions make up 0.5% or more, 1% or more, 1.5% or more, 2% or more, 2.5% or more. 3% or more, 3.5% or more, 4% or more, 4.5% or more, 5% or more, or 5.5% or more of the indels in the plurality of modified cells as a whole. In certain embodiments, HBG1/2 c.−112 to −116 deletions make up 0.5% to 6% of the indels in the plurality of modified cells as a whole. In certain embodiments, the HBG1/2 c.−113 to −117 deletions make up 0.5% or more, 1% or more, 1.5% or more, 2% or more, 2.5% or more. 3% or more, 3.5% or more, 4% or more, 4.5% or more, 5% or more, or 5.5% or more of the indels in the plurality of modified cells as a whole. In certain embodiments, HBG1/2 c.−113 to −117 deletions make up 0.5% to 6% of the indels in the plurality of modified cells as a whole.

[0031] In certain embodiments of the first populations of modified cells provided herein, the plurality of modified cells as a whole includes the 108 deletions present in all 14 samples in Table 32.

[0032] In certain embodiments of the first populations of modified cells provided herein, the plurality of modified cells as a whole includes the indels identified as having an “Ave % in Indel” of 0.1% or more in Table 32. In certain of these embodiments, the plurality of modified cells as a whole includes all of the indels in Table 32.

[0033] In certain embodiments of the first populations of modified cells provided herein, the plurality of modified cells as a whole include at least 10% more deletions of at least 4 base pairs than a second population of modified cells comprising a plurality of modified CD34+ or hematopoietic stem cells comprising a plurality of modified CD34+ or hematopoietic stem cells with one or more indels in an HBG gene promoter, where the indels of the second population of modified cells are generated by delivering a second RNP complex including a second gRNA having a gRNA targeting domain comprising SEQ ID NO:339 and a Cas9 RNA-guided nuclease to a second population of unmodified cells comprising a plurality of unmodified CD34+ or hematopoietic stem cells. In certain of these embodiments, the second RNP complex is delivered to the second population of unmodified cells by electroporation. In certain embodiments, the second population of unmodified cells is from a subject having sickle cell disease. In certain embodiments, the first population of modified cells has higher HbF levels than the second population of modified cells. In certain of these embodiments, the plurality of modified cells in the second population include an indel in a CCAAT box target region.

[0034] Provided herein in certain embodiments are methods of inducing expression of HbF in a first population of modified cells comprising a plurality of modified CD34+ or hematopoietic stem cells with one or more indels in an HBG gene promoter, the method comprising delivering a first RNP complex including a first gRNA comprising a first gRNA targeting domain and a Cpf1 RNA-guided nuclease or a modified Cpf1 RNA-guided nuclease to a first population of unmodified cells comprising a plurality of unmodified CD34+ or hematopoietic stem cells to generate indels. In certain embodiments, 60% or more, 65% or more, 70% or more, 75% or more, 80% or more, 85% or more, 90% or more, or 95% or more of the resultant indels in the plurality of modified cells as a whole are deletions of at least 4 base pairs. In certain embodiments, the first population of modified cells exhibits increased HbF levels versus the first population of unmodified cells. In certain embodiments, the first RNP complex is delivered to the first population of unmodified cells by electroporation.

[0035] Provided herein in certain embodiments are methods of decreasing sickling in a first population of red blood cells (RBCs) cultured from a first population of modified cells comprising a plurality of modified CD34+ cells with one or more indels in an HBG gene promoter, the method comprising delivering a first RNP complex including a first gRNA comprising a first gRNA targeting domain and a Cpf1 RNA-guided nuclease or a modified Cpf1 RNA-guided nuclease to a first population of unmodified cells comprising a plurality of unmodified CD34+ cells to generate indels, then culturing the first population of RBCs from the first population of modified cells. In certain embodiments, 60% or more, 65% or more, 70% or more, 75% or more, 80% or more, 85% or more, 90% or more, or 95% or more of the resultant indels in the plurality of modified cells as a whole are deletions of at least 4 base pairs. In certain embodiments, the first population of RBCs exhibits significantly decreased sickling upon deoxygenation versus a second population of RBCs cultured from the first population of unmodified cells. In certain embodiments, the first population of RBCs sickle at a significantly lower oxygen tension, for example as measured by relative oxygen pressure, than the second population of RBCs. In certain embodiments, the first population of RBCs has a significantly higher minimum elongation index upon deoxygenation than the second population of RBCs. In certain embodiments, the first population of RBCs has a significantly higher velocity upon deoxygenation than the second population of RBCs. In certain embodiments, the first population of RBCs has higher HbF levels than the second population of RBCs.

[0036] Provided herein in certain embodiments are methods of alleviating one or more symptoms of sickle cell disease in a subject in need thereof comprising delivering a first RNP complex including a first gRNA comprising a first targeting domain and a Cpf1 RNA-guided nuclease or a modified Cpf1 RNA-guided nuclease to a first population of unmodified cells comprising a plurality of unmodified CD34+ or hematopoietic stem cells to generate a first population of modified cells comprising a plurality of modified CD34+ or hematopoietic stem cells comprising one or more indels in an HBG gene promoter, and then administering the resultant first population of modified cells to the subject to alleviate one or more symptoms of sickle cell disease. In certain embodiments, 60% or more, 65% or more, 70% or more, 75% or more, 80% or more, 85% or more, 90% or more, or 95% or more of the resultant indels in the resultant plurality of modified CD34+ or hematopoietic stem cells as a whole are deletions of at least 4 base pairs. In certain embodiments, the methods further comprise detecting a population of modified erythroid progeny cells comprising a plurality of modified erythroid progeny cells cultured from the first population of modified cells at about 1 week, 2 weeks, 3 weeks, 4 weeks, 5 weeks, 6 weeks, 7 weeks, 8 weeks, 10 weeks, 12 weeks. 16 weeks, 20 weeks, 1 month, 2 months, 3 months, 4 months, 5 months, 6 months, 8 months, 12 months, 1 year, 2 years, 3 years, 4 years, 5 years, or more than κ years after administration. In certain embodiments, the cultured cells may include bone marrow (BM)-engrafted CD34+ hematopoietic stem cells or blood cells derived therefrom, e.g., myeloid progenitor or differentiated myeloid cells, e.g., erythrocytes, mast cells, myoblasts; or lymphoid progenitors or differentiated lymphoid cells, e.g., T- or B-lymphocytes or NK cells. In certain embodiments, the method results in long-term engraftment of a plurality of HSC clones in bone marrow, e.g., at least 1 week, 2 weeks, 3 weeks, 4 weeks, 5 weeks, 6 weeks, 7 weeks, 8 weeks, 10 weeks, 12 weeks. 16 weeks, 20 weeks, 1 month, 2 months, 3 months, 4 months, 5 months, 6 months, 8 months, 12 months, 1 year, 2 years, 3 years, 4 years, 5 years, or more than 5 years after administration. In certain embodiments the method results in long-term expression of at least 50%, at least 60%, at least 70%, at least 80%, at least 90%, at least 95%, or at least 99% of total hemoglobin as compared to a healthy subject. In certain embodiments, the method results in a reconstitution of all hematopoietic cell lineages, e.g., without any differentiation bias, e.g., without an erythroid lineage differentiation bias.

[0037] Provided herein in certain embodiments is a population of cells comprising a plurality of red blood cells (RBCs) cultured from a plurality of modified CD34+ cells from a subject having sickle cell disease, each modified cell comprising an indel in an HBG gene promoter. In certain embodiments, the plurality of modified cells as a whole includes the 108 deletions present in all 14 samples in FIG. 56A. In certain embodiments, the population of cells is generated by delivering an RNP complex including a gRNA comprising a first targeting domain and a Cpf1 RNA-guided nuclease or a modified Cpf1 RNA-guided nuclease to a plurality of unmodified CD34+ cells from a subject having sickle cell disease to generate the indels; and culturing the RBCs from the plurality of modified CD34+ cells.

[0038] Provided herein in certain embodiments is a population of cells comprising a plurality of red blood cells (RBCs) cultured from a plurality of modified CD34+ cells from a subject having sickle cell disease, each modified cell comprising an indel in an HBG gene promoter. In certain embodiments, 60% or more, 65% or more, 70% or more, 75% or more, 80% or more, 85% or more, 90% or more, or 95% or more of the indels in the HBG gene promoter are deletions of at least 4 base pairs. In certain embodiments, the population of cells is generated by delivering an RNP complex including a gRNA comprising a first targeting domain and a Cpf1 RNA-guided nuclease or a modified Cpf1 RNA-guided nuclease to a plurality of unmodified CD34+ cells from a subject having sickle cell disease to generate the indels; and culturing the RBCs from the plurality of modified CD34+ cells.

[0039] In certain embodiments of the population of cells comprising a plurality of RBCs provided herein, the plurality of RBCs sickle at a significantly lower oxygen tension, e.g., as measured by relative oxygen pressure, than a population of RBCs cultured from unmodified CD34+ cells, of the subject having sickle cell disease, have a significantly higher minimum elongation index upon deoxygenation than a population of RBCs cultured from unmodified CD34+ cells of the subject having sickle cell disease, and/or have a significantly higher velocity upon deoxygenation than a population of RBCs cultured from unmodified CD34+ cells of the subject having sickle cell disease.

[0040] Provided herein are genome editing systems, ribonucleoprotein (RNP) complexes, guide RNAs, Cpf1 proteins, including modified Cpf1 proteins (Cpf1 variants), and CRISPR-mediated methods for altering the promoter region of one or more γ-globin genes (e.g., HBG1, HBG2, or HBG1 and HBG2) and increasing expression of fetal hemoglobin (HbF). In certain embodiments, an RNP complex may include a guide RNA (gRNA) complexed to a wild-type Cpf1 or modified Cpf1 RNA-guided nuclease (modified Cpf1 protein). In certain embodiments, a gRNA may comprise a sequence set forth in Table 13, Table 18, or Table 19. In certain embodiments, a gRNA may comprise a gRNA targeting domain. In certain embodiments, a gRNA targeting domain may comprise a sequence selected from the group consisting of SEQ ID NOs:1002, 1254, 1258, 1260, 1262, and 1264. In certain embodiments, a gRNA may comprise a gRNA sequence set forth in Table 19. In certain embodiments, a gRNA may comprise a sequence selected from the group consisting of SEQ ID NOs:1022, 1023, 1041-1105. In certain embodiments, the RNP complex may comprise an RNP complex set forth in Table 21. For example, an RNP complex may include a gRNA comprising the sequence set forth in SEQ ID NO: 1051 and a modified Cpf1 protein encoded by the sequence set forth in SEQ ID NO: 1097 (RNP32, Table 21).

[0041] The inventors have discovered herein that delivery of an RNP complex including a gRNA complexed to a modified Cpf1 protein may result in increased editing of a target nucleic acid. In certain embodiments, the modified Cpf1 protein may contain one or more modifications. In certain embodiments, the one or more modifications may include, without limitation, one or more mutations in a wild-type Cpf1 amino acid sequence, one or more mutations in a wild-type Cpf1 nucleic acid sequence, one or more nuclear localization signals (NLS), one or more purification tags (e.g., His tag), or a combination thereof. In certain embodiments, a modified Cpf1 may be encoded by a sequence set forth in SEQ ID NOs:1000, 1001, 1008-1018, 1032, 1035-39, 1094-1097, 1107-09 (Cpf1 polypeptide sequences) or SEQ ID NOs:1019-1021, 1110-17 (Cpf1 polynucleotide sequences). In certain embodiments, the gRNA may be a modified or unmodified gRNA. In certain embodiments, the gRNA may comprise a sequence set forth in Table 13, Table 18, or Table 19. In certain embodiments, the RNP complex may comprise an RNP complex set forth in Table 21. For example, the RNP complex may include a gRNA comprising the sequence set forth in SEQ ID NO:1051 and a modified Cpf1 protein encoded by the sequence set forth in SEQ ID NO: 1097 (RNP32, Table 21). In certain embodiments, an RNP complex comprising a modified Cpf1 protein may increase editing of a target nucleic acid. In certain embodiments, an RNP complex comprising a modified Cpf1 protein may increase editing resulting in an increase of productive indels. In various embodiments, an increase in editing of the target nucleic acid may be assessed by any means known to skilled artisans, such as, but not limited to, PCR amplification of the target nucleic acid and subsequent sequencing analysis (e.g., Sanger sequencing, next generation sequencing).

[0042] The inventors have also discovered herein that delivery of an RNP complex including a modified gRNA complexed to an unmodified or modified Cpf1 protein may result in increased editing of a target nucleic acid. In certain embodiments, the modified gRNA may comprise one or more modifications including a phosphorothioate linkage modification, a phosphorodithioate (PS2) linkage modification, a 2′-O-methyl modification, one or more or a stretch of deoxyribonucleic acid (DNA) bases (also referred to herein as a “DNA extension”), one or more or a stretch of ribonucleic acid (RNA) bases (also referred to herein as a “RNA extension”), or combinations thereof. In certain embodiments, the DNA extension may comprise a sequence set forth in Table 24. For example, in certain embodiments, the DNA extension may comprise a sequence set forth in SEQ ID NOs:1235-1250. In certain embodiments, the RNA extension may comprise a sequence set forth in Table 24. For example, in certain embodiments, the RNA extension may comprise a sequence set forth in SEQ ID NOs:1231-1234, 1251-1253. In certain embodiments, the gRNA may comprise a sequence set forth in Table 13, Table 18, or Table 19. In certain embodiments, the RNP complex may comprise an RNP complex set forth in Table 21. For example, the RNP complex may include a gRNA comprising the sequence set forth in SEQ ID NO:1051 and a modified Cpf1 protein encoded by the sequence set forth in SEQ ID NO: 1097 (RNP32, Table 21). In certain embodiments, an RNP complex comprising a modified gRNA may increase editing of a target nucleic acid. In certain embodiments, an RNP complex comprising a modified gRNA may increase editing resulting in an increase of productive indels.

[0043] In certain embodiments, an RNP complex comprising a modified gRNA and a modified Cpf1 protein may increase editing of a target nucleic acid. In certain embodiments, an RNP complex comprising a modified gRNA and a modified Cpf1 protein may increase editing resulting in an increase of productive indels.

[0044] The inventors have also discovered that codelivery of an RNP complex comprising a gRNA complexed to a Cpf1 molecule (e.g., “gRNA-Cpf1-RNP”) with a “booster element” may result in increased editing of a target nucleic acid. In certain embodiments, the RNP complex may comprise an RNP complex set forth in Table 21. For example, the RNP complex may include a gRNA comprising the sequence set forth in SEQ ID NO:1051 and a modified Cpf1 protein encoded by the sequence set forth in SEQ ID NO: 1097 (RNP32, Table 21). As used herein, the term “booster element” refers to an element which, when co-delivered with a RNP complex comprising a gRNA complexed to an RNA-guided nuclease (“gRNA-nuclease-RNP”), increases editing of a target nucleic acid compared with editing of the target nucleic acid without the booster element. In certain embodiments, one or more booster elements may be codelivered with a gRNA-nuclease-RNP complex to increase editing of a target nucleic acid. In certain embodiments, codelivery of a booster element may increase editing resulting in an increase of productive indels. In various embodiments, an increase in editing of the target nucleic acid may be assessed by any means known to skilled artisans, such as, but not limited to, PCR amplification of the target nucleic acid and subsequent sequencing analysis (e.g., Sanger sequencing, next generation sequencing).

[0045] In certain embodiments, a gRNA-nuclease-RNP may comprise a gRNA-Cpf1-RNP. In certain embodiments, a Cpf1 molecule of the gRNA-Cpf1-RNP complex may be a wild-type Cpf1 or modified Cpf1. In certain embodiments, the Cpf1 molecule of the gRNA-Cpf1-RNP may be encoded by a sequence set forth in SEQ ID NOs:1000, 1001, 1008-1018, 1032, 1035-39, 1094-1097, 1107-09 (Cpf1 polypeptide sequences) or SEQ ID NOs:1019-1021, 1110-17 (Cpf1 polynucleotide sequences). In certain embodiments, the gRNA-Cpf1-RNP complex may comprise a gRNA comprising a targeting domain set forth in Table 13 or Table 18. In certain embodiments, the gRNA-Cpf1-RNP complex may comprise a gRNA comprising a sequence set forth in Table 19. In certain embodiments, the gRNA may be a modified or unmodified gRNA.

[0046] In certain embodiments, a booster element may comprise a dead RNP comprising a dead gRNA molecule complexed with an RNA-guided nuclease molecule (“dead gRNA-nuclease-RNP”). In certain embodiments, the dead gRNA-nuclease-RNP may comprise a dead gRNA complexed with a wild-type (WT) Cas9 molecule (“dead gRNA-Cas9-RNP”), a dead gRNA complexed with a Cas9 nickase molecule (“dead gRNA-nickase-RNP”) or a dead gRNA complexed with an enzymatically inactive (ei) Cas9 molecule (“dead gRNA-eiCas9-RNP”). In certain embodiments, the dead gRNA-nuclease-RNP complex may have decreased activity or lack nuclease activity. In certain embodiments, the dead gRNA of the dead gRNA-nuclease-RNP complex may comprise any of the dead gRNAs set forth herein. For example, the dead gRNA may comprise a targeting domain may be the same as or may differ by no more than 3 nucleotides from a dead gRNA targeting domain set forth in Table 10 or Table 15. In certain embodiments, the dead gRNA may include a targeting domain comprising a truncation of a gRNA targeting domain. In certain embodiments, the gRNA targeting domain to be truncated may be a gRNA targeting domain set forth in Table 2, Table 10, or Table 15. In certain embodiments, the dead gRNA may be a modified or unmodified dead gRNA. As shown herein, codelivery of a gRNA-Cpf1-RNP with a dead gRNA-Cas9-RNP (i.e., an RNP comprising a dead gRNA complexed to a WT Cas9) or codelivery of a gRNA-Cpf1-RNP with a dead gRNA-nickase-RNP (i.e., an RNP comprising a dead gRNA complexed to a Cas9 nickase (i.e., the Cas9 D10A nickase)) resulted in an increase in total editing above levels observed following delivery of gRNA-Cpf1-RNP alone (see, e.g., Examples, 15, 17,18). Dead gRNA molecules may comprise targeting domains complementary to regions proximal to or within a target region (e.g., the CCAAT box target region, 13 nt target region, proximal HBG1/2 promoter target sequence, and/or the GATA1 binding motif in BCL11Ae) in a target nucleic acid. In certain embodiments, “proximal to” may denote the region within 10, 25, 50, 100, or 200 nucleotides of a target region (e.g., the CCAAT box target region, 13 nt target region, proximal HBG1/2 promoter target sequence, and/or the GATA1 binding motif in BCL11Ae). In certain embodiments, one or more booster elements may be comprised of one or more dead gRNA-nuclease-RNPs, e.g., dead gRNA-Cas9-RNP, dead gRNA-nickase-RNP, dead gRNA-eiCas9-RNP, to be codelivered with a gRNA-Cpf1-RNP. In certain embodiments, codelivery of a dead gRNA-nuclease-RNP does not alter the indel profile of a gRNA-Cpf1-RNP.

[0047] In certain embodiments, a booster element may comprise an RNP complex comprising a gRNA molecule complexed with an RNA-guided nuclease nickase molecule (“gRNA-nickase-RNP”). In certain embodiments, the RNA-guided nuclease nickase molecule may be a Cas9 nickase molecule, e.g., Cas9 D10A nickase. In certain embodiments, the gRNA of the gRNA-nickase-RNP may comprise any of the gRNAs set forth herein. For example, the gRNA may comprise a gRNA targeting domain set forth in Table 2, Table 10, or Table 15. In certain embodiments, the gRNA may be a modified or unmodified gRNA. As shown herein, codelivery of gRNA-Cpf1-RNP with a gRNA-nickase-RNP complex (RNP comprising a guide RNA complexed to a Cas9D10A nickase molecule) resulted in an increase in total editing above levels observed following delivery of gRNA-Cpf1-RNP alone (see, e.g., Examples 15, 16). Additionally, codelivery of a gRNA-nickase-RNP complex with a gRNA-Cpf1-RNP complex altered the directionality, length, and/or position of the indel profile of gRNA-Cpf1-RNP. In certain embodiments, a booster enhancer may be used to provide a desired editing outcome, for example, to increase the rate of productive indels. In certain embodiments, codelivery of a gRNA-nickase-RNP complex with a gRNA-Cpf1-RNP complex may alter the indel profile of the gRNA-Cpf1-RNP.

[0048] In certain embodiments, a booster element may comprise a single stranded oligodeoxynucleotide (ssODN) or a double stranded oligodeoxynucleotide (dsODN). In certain embodiments, the ssODN may be any ssODN disclosed herein. In certain embodiments, an ssODN may comprise a sequence set forth in Table 11. For example, in certain embodiments, an ssODN may comprise the sequence set forth in SEQ ID NO: 1040.

[0049] In one aspect, the disclosure relates to an RNP complex comprising a CRISPR from Prevotella and Franciscella 1 (Cpf1) RNA-guided nuclease or a variant thereof and a gRNA, wherein the gRNA is capable of binding to a target site in a promoter of an HBG gene in a cell. In certain embodiments, the gRNA may be modified or unmodified. In certain embodiments, the gRNA may comprise one or more modifications including a phosphorothioate linkage modification, a phosphorodithioate (PS2) linkage modification, a 2′-O-methyl modification, a DNA extension, an RNA extension, or combinations thereof. In certain embodiments, the DNA extension may comprise a sequence set forth in Table 24. In certain embodiments, the RNA extension may comprise a sequence set forth in Table 24. In certain embodiments, the gRNA may comprise a sequence set forth in Table 13, Table 18, or Table 19. In certain embodiments, the RNP complex may comprise an RNP complex set forth in Table 21. For example, the RNP complex may include a gRNA comprising the sequence set forth in SEQ ID NO:1051 and a Cpf1 variant protein encoded by the sequence set forth in SEQ ID NO:1097 (RNP32, Table 21). In certain embodiments, the Cpf1 variant protein may contain one or more modifications. In certain embodiments, the one or more modifications may include, without limitation, one or more mutations in a wild-type Cpf1 amino acid sequence, one or more mutations in a wild-type Cpf1 nucleic acid sequence, one or more nuclear localization signals (NLS), one or more purification tags (e.g., His tag), or a combination thereof. In certain embodiments, a Cpf1 variant protein may be encoded by a sequence set forth in SEQ ID NOs:1000, 1001, 1008-1018, 1032, 1035-39, 1094-1097, 1107-09 (Cpf1 polypeptide sequences) or SEQ ID NOs:1019-1021, 1110-17 (Cpf1 polynucleotide sequences).

[0050] In one aspect, the disclosure relates to a method of altering a promoter of an HBG gene in a cell comprising contacting the cell with an RNP complex disclosed herein. In certain embodiments, the alteration may comprise an indel within one or more regions set forth in Table 17. In certain embodiments, the alteration may comprise an indel within a CCAAT box target region of the promoter of an HBG gene. For example, in certain embodiments, the alteration may comprise an indel within Chr 11 (NC_000011.10): 5,249,955-5,249,987 (Table 17, Region 6), Chr 11 (NC_000011.10): 5,254,879-5,254,909 (Table 17, Region 16), or a combination thereof. In certain embodiments, the RNP complex may comprise a gRNA and a Cpf1 protein. In certain embodiments, the gRNA may comprise an RNA targeting domain set forth in Table 19. In certain embodiments, the gRNA targeting domain may comprise a sequence selected from the group consisting of SEQ ID NOs:1002, 1254, 1258, 1260, 1262, and 1264. In certain embodiments, the gRNA may comprise a gRNA sequence set forth in Table 19. In certain embodiments, the gRNA may comprise a sequence selected from the group consisting of SEQ ID NOs:1022, 1023, 1041-1105. In certain embodiments, a gRNA may be configured to provide an editing event at Chr11:5249973, Chr11:5249977 (HBG1); Chr11:5250042, Chr11:5250046 (HBG1); Chr11:5250055, Chr11:5250059 (HBG1); Chr11:5250179, Chr11:5250183 (HBG1); Chr11:5254897, Chr11:5254901 (HBG2); Chr11:5254897, Chr11:5254901 (HBG2); Chr11:5254966, 5254970 (HBG2); Chr11:5254979, 5254983 (HBG2) (Table 22, Table 23). In certain embodiments, the cell may be further contacted with a booster element. In certain embodiment, a booster element may comprise a single stranded oligodeoxynucleotide (ssODN) or a double stranded oligodeoxynucleotide (dsODN). In certain embodiments, the ssODN may be any ssODN disclosed herein. In certain embodiments, an ssODN may comprise a sequence set forth in Table 11. For example, in certain embodiments, an ssODN may comprise the sequence set forth in SEQ ID NO: 1040.

[0051] In one aspect, the disclosure relates to an isolated cell comprising an alteration in a promoter of HBG gene generated by the delivery of an RNP complex to the cell. In certain embodiments, the RNP complex may comprise a gRNA and a Cpf1 protein. In certain embodiments, the gRNA may be modified or unmodified. In certain embodiments, the gRNA may comprise one or more modifications including a phosphorothioate linkage modification, a phosphorodithioate (PS2) linkage modification, a 2′-O-methyl modification, a DNA extension, an RNA extension, or combinations thereof. In certain embodiments, the DNA extension may comprise a sequence set forth in Table 24. In certain embodiments, the RNA extension may comprise a sequence set forth in Table 24. In certain embodiments, the gRNA may comprise a sequence set forth in Table 13, Table 18, or Table 19. In certain embodiments, the RNP complex may comprise an RNP complex set forth in Table 21. For example, the RNP complex may include a gRNA comprising the sequence set forth in SEQ ID NO: 1051 and a Cpf1 variant protein encoded by the sequence set forth in SEQ ID NO: 1097 (RNP32, Table 21). In certain embodiments, the Cpf1 variant protein may contain one or more modifications. In certain embodiments, the one or more modifications may include, without limitation, one or more mutations in a wild-type Cpf1 amino acid sequence, one or more mutations in a wild-type Cpf1 nucleic acid sequence, one or more nuclear localization signals (NLS), one or more purification tags (e.g., His tag), or a combination thereof. In certain embodiments, a Cpf1 variant protein may be encoded by a sequence set forth in SEQ ID NOs:1000, 1001, 1008-1018, 1032, 1035-39, 1094-1097, 1107-09 (Cpf1 polypeptide sequences) or SEQ ID NOs:1019-1021, 1110-17 (Cpf1 polynucleotide sequences). In certain embodiments, a booster element may be co-delivered with the RNP complex. In certain embodiment, a booster element may comprise a single stranded oligodeoxynucleotide (ssODN) or a double stranded oligodeoxynucleotide (dsODN). In certain embodiments, the ssODN may be any ssODN disclosed herein. In certain embodiments, an ssODN may comprise a sequence set forth in Table 11. For example, in certain embodiments, an ssODN may comprise the sequence set forth in SEQ ID NO: 1040.

[0052] In one aspect, the disclosure relates to an ex vivo method of increasing the level of fetal hemoglobin (HbF) in a human cell by genome editing using an RNP complex comprising a gRNA and a Cpf1 RNA-guided nuclease or a variant thereof to affect an alteration in a promoter of an HBG gene, thereby to increase expression of HbF. In certain embodiments, the gRNA may be modified or unmodified. In certain embodiments, the gRNA may comprise one or more modifications including a phosphorothioate linkage modification, a phosphorodithioate (PS2) linkage modification, a 2′-O-methyl modification, a DNA extension, an RNA extension, or combinations thereof. In certain embodiments, the DNA extension may comprise a sequence set forth in Table 24. In certain embodiments, the RNA extension may comprise a sequence set forth in Table 24. In certain embodiments, the gRNA may comprise a sequence set forth in Table 13, Table 18, or Table 19. In certain embodiments, the RNP complex may comprise an RNP complex set forth in Table 21. For example, the RNP complex may include a gRNA comprising the sequence set forth in SEQ ID NO: 1051 and a Cpf1 variant protein encoded by the sequence set forth in SEQ ID NO: 1097 (RNP32, Table 21). In certain embodiments, the Cpf1 variant protein may contain one or more modifications. In certain embodiments, the one or more modifications may include, without limitation, one or more mutations in a wild-type Cpf1 amino acid sequence, one or more mutations in a wild-type Cpf1 nucleic acid sequence, one or more nuclear localization signals (NLS), one or more purification tags (e.g., His tag), or a combination thereof. In certain embodiments, a Cpf1 variant protein may be encoded by a sequence set forth in SEQ ID NOs:1000, 1001, 1008-1018, 1032, 1035-39, 1094-1097, 1107-09 (Cpf1 polypeptide sequences) or SEQ ID NOs:1019-1021, 1110-17 (Cpf1 polynucleotide sequences). In certain embodiments, a booster element may be co-delivered with the RNP complex. In certain embodiment, a booster element may comprise a single stranded oligodeoxynucleotide (ssODN) or a double stranded oligodeoxynucleotide (dsODN). In certain embodiments, the ssODN may be any ssODN disclosed herein. In certain embodiments, an ssODN may comprise a sequence set forth in Table 11. For example, in certain embodiments, an ssODN may comprise the sequence set forth in SEQ ID NO: 1040.

[0053] In one aspect, the disclosure relates to a population of CD34+ or hematopoietic stem cells, wherein one or more cells in the population comprises an alteration in a promoter of an HBG gene, which alteration is generated by delivering an RNP complex comprising a gRNA and a Cpf1 RNA-guided nuclease or a variant thereof to the population of CD34+ or hematopoietic stem cells. In certain embodiments, the gRNA may be modified or unmodified. In certain embodiments, the gRNA may comprise one or more modifications including a phosphorothioate linkage modification, a phosphorodithioate (PS2) linkage modification, a 2′-O-methyl modification, a DNA extension, an RNA extension, or combinations thereof. In certain embodiments, the DNA extension may comprise a sequence set forth in Table 24. In certain embodiments, the RNA extension may comprise a sequence set forth in Table 24. In certain embodiments, the gRNA may comprise a sequence set forth in Table 13, Table 18, or Table 19. In certain embodiments, the RNP complex may comprise an RNP complex set forth in Table 21. For example, the RNP complex may include a gRNA comprising the sequence set forth in SEQ ID NO:1051 and a Cpf1 variant protein encoded by the sequence set forth in SEQ ID NO: 1097 (RNP32, Table 21). In certain embodiments, the Cpf1 variant protein may contain one or more modifications. In certain embodiments, the one or more modifications may include, without limitation, one or more mutations in a wild-type Cpf1 amino acid sequence, one or more mutations in a wild-type Cpf1 nucleic acid sequence, one or more nuclear localization signals (NLS), one or more purification tags (e.g., His tag), or a combination thereof. In certain embodiments, a Cpf1 variant protein may be encoded by a sequence set forth in SEQ ID NOs:1000, 1001, 1008-1018, 1032, 1035-39, 1094-1097, 1107-09 (Cpf1 polypeptide sequences) or SEQ ID NOs:1019-1021, 1110-17 (Cpf1 polynucleotide sequences). In certain embodiments, a booster element may be co-delivered with the RNP complex. In certain embodiment, a booster element may comprise a single stranded oligodeoxynucleotide (ssODN) or a double stranded oligodeoxynucleotide (dsODN). In certain embodiments, the ssODN may be any ssODN disclosed herein. In certain embodiments, an ssODN may comprise a sequence set forth in Table 11. For example, in certain embodiments, an ssODN may comprise the sequence set forth in SEQ ID NO: 1040.

[0054] In one aspect, the disclosure relates to a method of alleviating one or more symptoms of sickle cell disease in a subject in need thereof, the method comprising: a) isolating a population of CD34+ or hematopoietic stem cells from the subject; b) modifying the population of isolated cells ex vivo by delivering an RNP complex comprising a gRNA and a Cpf1 RNA-guided nuclease or a variant thereof to the population of isolated cells, thereby to affect an alteration in a promoter of an HBG gene in one or more cells in the population; and c) administering the modified population of cells to the subject, thereby to alleviate one or more symptoms of sickle cell disease in the subject. In certain embodiments, the alteration may comprise an indel within a CCAAT box target region of the promoter of the HBG gene. In certain embodiments, the RNP complex may be delivered using electroporation. In certain embodiments, at least about 5%, at least about 10%, at least about 20%, at least about 30%, at least about 40%, at least about 50%, at least about 60%, at least about 70%, at least about 80% or at least about 90% of the cells in the population of cells comprise a productive indel.

[0055] In one aspect, the disclosure relates to a gRNA comprising a 5′ end and a 3′ end, and comprising a DNA extension at the 5′ end and a 2′-O-methyl-3′-phosphorothioate modification at the 3′ end, wherein the gRNA includes an RNA segment capable of hybridizing to a target site and an RNA segment capable of associating with a Cpf1 RNA-guided nuclease. In certain embodiments, the DNA extension may comprise a sequence set forth in SEQ ID NOs:1235-1250. In certain embodiments, the gRNA may be modified or unmodified. In certain embodiments, the gRNA may comprise one or more modifications including a phosphorothioate linkage modification, a phosphorodithioate (PS2) linkage modification, a 2′-O-methyl modification, a DNA extension, an RNA extension, or combinations thereof. In certain embodiments, the DNA extension may comprise a sequence set forth in Table 24. In certain embodiments, the RNA extension may comprise a sequence set forth in Table 24. In certain embodiments, the gRNA may comprise a sequence set forth in Table 13, Table 18, or Table 19.

[0056] In one aspect, the disclosure relates to an RNP complex comprising a Cpf1 RNA-guided nuclease as disclosed herein and a gRNA as disclosed herein.

[0057] Also provided herein are genome editing systems, guide RNAs, and CRISPR-mediated methods for altering one or more γ-globin genes (e.g., HBG1, HBG2, or HBG1 and HBG2), the erythroid specific enhancer of the BCL11A gene (BCL11Ae), or a combination thereof, and increasing expression of fetal hemoglobin (HbF). In certain embodiments, one or more gRNAs comprising a sequence set forth in Table 18 or Table 19 may be used to introduce alterations in the promoter region of the HBG gene. In certain embodiments, genome editing systems, guide RNAs, and CRISPR-mediated methods may alter a 13 nucleotide (nt) target region that is 5′ of the transcription site of the HBG1, HBG2, or HBG1 and HBG2 gene (“13 nt target region”). In certain embodiments, genome editing systems, guide RNAs, and CRISPR-mediated methods may alter a CCAAT box target region that is 5′ of the transcription site of the HBG1, HBG2, or HBG1 and HBG2 gene (“CCAAT box target region”). In certain embodiments, the CCAAT box target region may be the region that is at or near the distal CCAAT box and includes the nucleotides of the distal CCAAT box and 25 nucleotides upstream (5′) and 25 nucleotides downstream (3′) of the distal CCAAT box (i.e., HBG1/2 c.−86 to −140). In certain embodiments, the CCAAT box target region may be the region that is at or near the distal CCAAT box and includes the nucleotides of the distal CCAAT box and 5 nucleotides upstream (5′) and 5 nucleotides downstream (3′) of the distal CCAAT box (i.e., HBG1 2 c.−106 to −120). In certain embodiments, the CCAAT box target region may comprise a 18 nt target region, a 13 nt target region, a 11 nt target region, a 4 nt target region, a 1 nt target region, a −117G>A target region, or a combination thereof as disclosed herein. In certain embodiments, the alteration may be a 18 nt deletion, 13 nt deletion, 11 nt deletion, 4 nt deletion, 1 nt deletion, a substitution from G to A at c.−117 of the HBG1, HBG2, or HBG1 and HBG2 gene, or a combination thereof. In certain embodiments, the alteration may be a non-naturally occurring alteration or a naturally occurring alteration. In certain embodiments, one or more gRNAs comprising a targeting domain set forth in SEQ ID NOs:251-901 or 940-942 may be used to introduce alterations in the 13 nt target region. In certain embodiments, one or more gRNAs comprising a sequence set forth in SEQ ID NOs:251-901, 940-942, 996, 997, 970, 971, 1002, or 1003 may be used to introduce alterations in the CCAAT box target region. In certain embodiments, genome editing systems, guide RNAs, and CRISPR-mediated methods may alter a GATA1 binding motif in BCL11Ae that is in the +58 DNase I hypersensitive site (DHS) region of intron 2 of the BCL11A gene (“GATA1 binding motif in BCL11Ae”). In certain embodiments, one or more gRNAs comprising a targeting domain set forth in SEQ ID NOs:952-955 may be used to introduce alterations in the GATA1 binding motif in BCL11Ae. In certain embodiments, one or more gRNAs may be used to introduce alterations in the GATA1 binding motif in BCL11Ae and one or more gRNAs may be used to introduce alterations in the 13 nt target region of HBG1 and/or HBG2.

[0058] Also provided herein in certain embodiments are the use of optional genome editing system components such as template nucleic acids (oligonucleotide donor templates). In certain embodiments, template nucleic acids for use in targeting the CCAAT target region may include, without limitation, template nucleic acids encoding alterations of the CCAAT box target region. In certain embodiments, the CCAAT box target region may comprise a 18 nt target region, a 11 nt target region, a 4 nt target region, a 1 nt target region, or a combination thereof. In certain embodiments, the template nucleic acid may be a single stranded oligodeoxynucleotide (ssODN) or a double stranded oligodeoxynucleotide (dsODN). In certain embodiments, 5′ and 3′ homology arms, and exemplary full-length donor templates encoding alterations at the CCAAT box target region are also presented below (e.g., SEQ ID NOS: 904-909, 974-995). In certain embodiments, the template nucleic acid may be a positive strand or a negative strand. In certain embodiments, the ssODN may comprise a 5′ homology arm, a replacement sequence, and a 3′ homology arm. In certain embodiments, the 5′ homology arm may be about 25 to about 200 nucleotides or more in length, e.g., at least about 25, 50, 75, 100, 125, 150, 175, or 200 nucleotides in length; the replacement sequence may comprise 0 nucleotides in length; and the 3′ homology arm may be about 25 to about 200 nucleotides or more in length, e.g., at least about 25, 50, 75, 100, 125, 150, 175, or 200 nucleotides in length. In certain embodiments, the ssODN may comprise one or more phosphorothioates.

[0059] In certain embodiments, the genome editing systems, guide RNAs, and CRISPR-mediated methods for altering one or more γ-globin genes (e.g., HBG1, HBG2, or HBG1 and HBG2), may include an RNA-guided nuclease. In certain embodiments, the RNA-guided nuclease may a Cas9 or modified Cas 9. In certain embodiments, the RNA-guided nuclease may a Cpf1 or modified Cpf1 as disclosed herein.

[0060] In one aspect, the disclosure relates to compositions including a plurality of cells generated by the methods disclosed above, in which at least 20%, 30%, 40%, 50%, 60%, 70%, 80% or 90% of the cells include an alteration of a sequence of a 13 nt target region of the human HBG1 or HBG2 gene or a plurality of cells generated by the methods disclosed above, wherein at least 20%, 30%, 40%, 50%, 60%, 70%, 80% or 90% of the cells include an alteration of a sequence of a 13 nt target region of the human HBG1 or HBG2 gene and at least 20%, 30%, 40%, 50%, 60%, 70%, 80% or 90% of the cells include an alteration of a sequence of the GATA1 binding motif in BCL11Ae. In certain embodiments, at least a portion of the plurality of cells may be within an erythroid lineage. In certain embodiments, the plurality of cells may be characterized by an increased level of fetal hemoglobin expression relative to an unmodified plurality of cells. In certain embodiments, the level of fetal hemoglobin may be increased by at least 20%, 30%, 40%, 50%, 60%, 70%, 80% or 90%. In certain embodiments, the compositions may further include a pharmaceutically acceptable carrier.

[0061] In one aspect, the disclosure relates to a method of altering a cell, that includes unwinding a chromatin segment within or proximal to a target region of a nucleic acid in a cell and generating a double stranded break (DSB) within the target region of the nucleic acid whereby to alter the target region. In certain embodiments, the step of unwinding the chromatin segment may include contacting the chromatin segment with an RNA-guided helicase. In certain embodiments, the step of unwinding the chromatin does not include recruiting an exogenous trans-acting factor to the chromatin segment. The RNA-guided helicase may be an RNA-guided nuclease, and the RNA-guided nuclease may be complexed to a dead guide RNA (dgRNA) including a first targeting domain sequence of 15 or fewer nucleotides in length. In certain embodiments, the dgRNA may include modifications at the 5′ or 3′ end, including, but not limited to, an anti-reverse cap analog (ARCA) at the 5′ end of the RNA, a polyA tail at the 3′ end of the RNA, or both. In certain embodiments, the RNA-guided helicase may be an enzymatically active RNA-guided nuclease or may be configured to lack nuclease activity. In certain embodiments, the targeting domain sequence of the dgRNA may be complementary to a sequence proximal to the target region. “Proximal to,” in some embodiments herein, may mean within 10, 25, 50, 100, or 200 nucleotides of the target region. In certain embodiments, the step of unwinding the chromatin segment may not include forming a single or double-stranded break in the nucleic acid within the chromatin segment. In certain embodiments, the step of generating the DSB within the target region may include contacting the chromatin segment with an RNA-guided nuclease having nuclease activity. In certain embodiments, the RNA-guided nuclease having nuclease activity may be complexed to a gRNA including a targeting domain configured to overlap the target region. In certain embodiments, the RNA-guided nuclease having nuclease activity may be a Cpf1 molecule.

[0062] Another aspect of the disclosure includes a method of inducing accessibility to a target region of a nucleic acid for editing in a cell including contacting the cell with an RNA-guided helicase and a dgRNA and unwinding DNA within or proximal to the target region with the RNA-guided helicase thereby inducing accessibility to the target region for editing. In various cases, the RNA-guided helicase and the dgRNA may be configured to associate within or proximal to the target region. In certain embodiments, the dgRNA may be configured such that it does not provide an RNA-guided nuclease cleavage event. In certain embodiments, the RNA-guided helicase and dgRNA may complex to form a dead ribonucleoprotein (RNP) that lacks cleavage activity. In certain embodiments, the dgRNA may include a targeting domain sequence of 15 or fewer nucleotides in length. In certain embodiments, the RNA-guided helicase may be an RNA-guided nuclease. In certain embodiments, the RNA-guided nuclease and dgRNA are not configured to recruit an exogenous trans-acting factor to the target region. In certain embodiments, the RNA-guided nuclease may be a Cas9 or a Cas9-fusion protein. In certain embodiments, the Cas9 may be an enzymatically active Cas9 or an enzymatically dead Cas9. In certain embodiments, the Cas9 may be a nickase, e.g., Cas9 D10A. In certain embodiments, the step of unwinding the DNA does not comprise forming a single or double-stranded break in the DNA. In certain embodiments, the RNA-guided nuclease having nuclease activity may be complexed to a gRNA including a targeting domain configured to overlap the target region. In certain embodiments, the RNA-guided nuclease having nuclease activity may be a Cpf1 molecule.

[0063] In another aspect, the disclosure relates to a method of increasing a rate of indel formation in a nucleic acid that includes unwinding double stranded DNA within or proximal to a target region of the nucleic acid using an RNA-guided helicase configured to associate within or proximal to the target region and generating a DSB within the target region. In certain embodiments, generating a DSB within the target region results in forming an indel at the target region. In certain embodiments, the DSB may be repaired in a manner forming an indel at the target region. In certain embodiments, the rate of indel formation in the gene achieved using the RNA-guided helicase is increased compared to a rate of indel formation in the gene achieved without using the RNA-guided helicase. In certain embodiments, the RNA-guided helicase may form an RNP complex with a dgRNA configured to associate within or proximal to the target region. In certain embodiments, the dgRNA may include a targeting domain sequence of 15 nucleotides or less in length. In certain embodiments, the RNA-guided helicase may be an RNA-guided nuclease. In certain embodiments, the RNA-guided nuclease may be a Cas9 or a Cas9-fusion protein. In certain embodiments, the Cas9 may be an enzymatically active Cas9 or an enzymatically dead Cas9. In certain embodiments, the Cas9 may be a nickase, e.g., Cas9 D10A. In certain embodiments, the RNA-guided nuclease and the dgRNA are not configured to recruit an exogenous trans-acting factor to the target region. In certain embodiments, the step of unwinding the double stranded DNA does not include forming a single or double-stranded break in the DNA.

[0064] In yet another aspect, this disclosure relates to a method of deleting a segment of a target nucleic acid in a cell that includes contacting the cell with an RNA-guided helicase and generating a DSB within the target region, whereby a segment of the target nucleic acid is deleted. In certain embodiments, the DSB may be repaired in a manner that deletes a segment of the target nucleic acid. In certain embodiments, the RNA-guided helicase may be configured to associate within or proximal to a target region of the target nucleic acid and unwind double stranded DNA (dsDNA) within or proximal to the target region. In certain embodiments, the RNA-guided helicase may form an ribonucleoprotein complex with a dgRNA configured to associate within or proximal to the target region. In certain embodiments, the dgRNA may include a targeting domain sequence of 15 nucleotides or less in length. In certain embodiments, the RNA-guided helicase may be an RNA-guided nuclease. In certain embodiments, the RNA-guided nuclease may be a Cas9 or a Cas9-fusion protein. In certain embodiments, the Cas9 may be an enzymatically active Cas9 or an enzymatically dead Cas9. In certain embodiments, the RNA-guided nuclease and the dgRNA are not configured to recruit an exogenous trans-acting factor to the target region. In certain embodiments, the target nucleic acid may be a promoter region of a gene, a coding region of a gene, a non-coding region of a gene, an intron of a gene, or an exon of a gene. In certain embodiments, the segment of the target nucleic acid may be at least about 15, 20, 25, 30, 35, 40, 45, 50, 55, 60, 65, 70, 75, or 100 base pairs in length.

[0065] The disclosure also relates to a dead gRNA (dgRNA) molecule including a targeting domain comprising a truncation of a gRNA targeting domain. In certain embodiments, the gRNA targeting domain to be truncated may be a gRNA targeting domain set forth in Table 2, Table 10, or Table 15. In certain embodiments, the gRNA targeting domain may be truncated from a 5′ end of the gRNA targeting domain. In certain embodiments, the dgRNA may include a targeting domain sequence of 15 nucleotides or less in length. In certain embodiments, the first targeting domain may be the same as or may differ by no more than 3 nucleotides from a dgRNA targeting domain set forth in Table 10 or Table 15.

[0066] Another aspect of the disclosure relates to compositions including at least one polynucleotide encoding a plurality of gRNAs and an RNA-guided helicase, in which at least one gRNA may be a dgRNA configured such that it does not provide an RNA-guided nuclease cleavage event. In certain embodiments, the dgRNA may include a targeting domain sequence of 15 nucleotides or less in length. In certain embodiments, the RNA-guided helicase may be an RNA-guided nuclease. In certain embodiments, the RNA-guided nuclease may be a Cas9 or a Cas9-fusion protein. In certain embodiments, the Cas9 may be an enzymatically active Cas9 or an enzymatically dead Cas9. In certain embodiments, the Cas9 may be a nickase, e.g., Cas9 D10A. In certain embodiments, the RNA-guided nuclease and the dgRNA are not configured to recruit an exogenous trans-acting factor to the target region. In certain embodiments, the compositions further include a second RNA-guided nuclease configured to provide a cleavage event. In certain embodiments, the compositions further include a second gRNA configured to provide a cleavage event.

[0067] In another aspect, the disclosure relates to genome editing systems that include an RNA-guided nuclease and an RNA-guided helicase configured to associate with a target nucleic acid proximal to a target region of the target nucleic acid and induce a conformational change in the target region thereby promoting accessibility to the target region for the RNA-guided nuclease to form a break in the target region. The disclosure also relates to genome editing systems that include a dgRNA including a targeting domain sequence of 15 nucleotides or less in length, a first RNA-guided nuclease, and an RNA-guided helicase. In certain embodiments, the genome editing system further includes a gRNA. In certain embodiments, the gRNA and the first RNA-guided nuclease may associate with a target region in a target nucleic acid. In certain embodiments, the first RNA-guided nuclease may be a Cpf1 molecule. In certain embodiments, the gRNA and the first RNA-guided nuclease may associate with a first PAM sequence in a target nucleic acid, wherein the first PAM sequence is facing outward. In certain embodiments, the RNA-guided helicase may be a second RNA-guided nuclease. In certain embodiments, the second RNA-guided nuclease and the dgRNA are not configured to recruit an exogenous trans-acting factor to the target region. In certain embodiments, the dgRNA and the second RNA-guided nuclease associate within or proximal to a target region in the target nucleic acid. In certain embodiments, the first RNA-guided nuclease and second RNA-guided nuclease may be complexed with the gRNA and dgRNAs, respectively, forming first and second ribonucleoprotein complexes.

[0068] In another aspect, the disclosure relates to a genome editing system that includes a dgRNA comprising a targeting domain sequence of 15 nucleotides or less in length, a first RNA-guided nuclease, and an RNA-guided helicase. In certain embodiments, the gRNA and the first RNA-guided nuclease may associate with a target region in a target nucleic acid. In certain embodiments, the first RNA-guided nuclease may be a Cpf1 molecule. In certain embodiments, the gRNA and the first RNA-guided nuclease may associate with a first protospacer adjacent motif (PAM) sequence in a target nucleic acid. In certain embodiments, the first PAM sequence may be facing outward. In certain embodiments, the RNA-guided helicase may be a second RNA-guided nuclease. In certain embodiments, the second RNA-guided nuclease and the dgRNA are not configured to recruit an exogenous trans-acting factor to the target region. In certain embodiments, the dgRNA and the second RNA-guided nuclease may associate within or proximal to a target region in the target nucleic acid. In certain embodiments, the first RNA-guided nuclease and second RNA-guided nuclease may be complexed with the gRNA and dgRNAs, respectively, forming first and second ribonucleoprotein complexes. In certain embodiments, the dgRNA and the second RNA-guided nuclease may associate with a second PAM sequence in a target nucleic acid, wherein the second PAM sequence may be facing outward.

[0069] In another aspect, the disclosure relates to a genome editing system that includes a dgRNA, a first gRNA comprising a second targeting domain sequence greater than 17 nucleotides in length, a first RNA-guided nuclease, and a second RNA-guided nuclease. In certain embodiments, the first RNA-guided nuclease and the dgRNA may be configured to associate within a first target region in a target nucleic acid. In certain embodiments, the second RNA-guided nuclease and the first gRNA may be configured to associate within a second target region and generate a double stranded break (DSB) in the target nucleic acid whereby to create an indel between the first target region and the second target region. In certain embodiments, the second RNA-guided nuclease may be a Cpf1 molecule. In certain embodiments, the dgRNA may comprise a first targeting domain sequence of 15 nucleotides or less in length. In certain embodiments, the dgRNA has reduced or no RNA-guided nuclease cleavage activity. In certain embodiments, the dgRNA may be configured such that it does not provide an RNA-guided nuclease cleavage event. In certain embodiments, the dgRNA and the first RNA-guided nuclease may associate with a first protospacer adjacent motif (PAM) sequence in the target nucleic acid. In certain embodiments, the first PAM sequence may be facing outward. In certain embodiments, the first gRNA and the second RNA-guided nuclease may associate with a second PAM sequence in the target nucleic acid. In certain embodiments, the second PAM sequence may be facing outward.

[0070] In another aspect, the disclosure relates to a method of altering a cell, including contacting the cell with a dgRNA, a first gRNA comprising a second targeting domain sequence greater than 17 nucleotides in length, a first RNA-guided nuclease, and a second RNA-guided nuclease. In certain embodiments, the first RNA-guided nuclease and the dgRNA may be configured to associate within a first target region in a target nucleic acid. In certain embodiments, the second RNA-guided nuclease and the first gRNA may associate within a second target region and generate a double stranded break (DSB) in the target nucleic acid whereby to create an indel between the first target region and the second target region. In certain embodiments, the second RNA-guided nuclease may be a Cpf1 molecule. In certain embodiments, the dgRNA may comprise a first targeting domain sequence of 15 nucleotides or less in length. In certain embodiments, the dgRNA has reduced or no RNA-guided nuclease cleavage activity. In certain embodiments, the dgRNA may be configured such that it does not provide an RNA-guided nuclease cleavage event. In certain embodiments, the dgRNA and the first RNA-guided nuclease may associate with a first protospacer adjacent motif (PAM) sequence in the target nucleic acid. In certain embodiments, the first PAM sequence may be facing outward. In certain embodiments, the first gRNA and the second RNA-guided nuclease may associate with a second PAM sequence in the target nucleic acid. In certain embodiments, the second PAM sequence may be facing outward.

[0071] The disclosure herein also relates to methods of altering a cells, including contacting a cell with any of the genome editing systems disclosed herein. In certain embodiments, the step of contacting the cell may comprise contacting the cell with a solution comprising first and second ribonucleoprotein complexes. In certain embodiments, the step of contacting the cell with the solution further comprises electroporating the cells, thereby introducing the first and second ribonucleoprotein complexes into the cell.

[0072] In another aspect, the disclosure relates to cells that are altered using the methods disclosed herein. Cells that include a productive indel which results in HbF expression are also disclosed herein. In certain embodiments the indel may be produced by contacting the cell with a dgRNA, a first gRNA including a second targeting domain sequence greater than 17 nucleotides in length, a first RNA-guided nuclease, and a second RNA-guided nuclease. In certain embodiments, the first RNA-guided nuclease and the dgRNA may be configured to associate within a first target region in a target nucleic acid. In certain embodiments, the second RNA-guided nuclease and the first gRNA may associate with a second target region and generate a double stranded break (DSB) in the target nucleic acid whereby to create an indel between the first target region and the second target region. In certain embodiments, the cells disclosed herein, may be capable of differentiating into an erythroblast, erythrocyte, or a precursor of an erythrocyte or erythroblast. In certain embodiments, the cell may be a CD34+ cell.

[0073] A genome editing system or method including any of all of the features described above may include a target nucleic acid comprising a human HBG1, HBG2 gene, or a combination thereof. In certain embodiments, the target region may be a CCAAT box target region of the human HBG1, HBG2 gene, or a combination thereof. In certain embodiments, the first targeting domain sequence may be complementary to a first sequence on a side of a CCAAT box target region of the human HBG1, HBG2 gene, or a combination thereof, in which the first sequence optionally overlaps the CCAAT box target region of the human HBG1, HBG2 gene, or a combination thereof. In certain embodiments, the second targeting domain sequence may be complementary to a second sequence on a side of a CCAAT box target region of the human HBG1, HBG2 gene, or a combination thereof, in which the second sequence optionally overlaps the CCAAT box target region of the human HBG1, HBG2 gene, or a combination thereof. In certain embodiments, the first targeting domain may comprise a truncation of a gRNA targeting domain. In certain embodiments, the gRNA targeting domain may include the gRNAs set forth in Table 2, Table 10, or Table 15, and the gRNA targeting domain has been truncated from a 5′ end of the gRNA targeting domain. In certain embodiments, the first targeting domain may be the same as or differs by no more than 3 nucleotides from a dgRNA targeting domain set forth in Table 10 or Table 15. In certain embodiments, the second targeting domain differs by no more than 3 nucleotides from a gRNA targeting domain set forth in Table 2, Table 10, or Table 15. In certain embodiments, the indel may alter the CCAAT box target region indel. In certain embodiments, the indel may be a productive indel resulting in an increased level of fetal hemoglobin expression. In certain embodiments, the gRNA, dgRNA, or both may be in vitro synthesized or chemically synthesized.

[0074] In certain embodiments, a cell may include at least one modified allele of the HBG locus generated by any of the methods for altering a cell disclosed herein, in which the modified allele of the HBG locus comprises an alteration of the human HBG1 gene, HBG2, gene, or a combination thereof.

[0075] In certain embodiments, an isolated population of cells may be modified by any of the methods for altering a cells disclosed herein, wherein the population of cells may include a distribution of indels that may be different from an isolated population of cells or their progenies of the same cell type that have not been modified by the method.

[0076] In certain embodiments, a plurality of cells may be generated by any of the methods for altering a cells disclosed herein, in which at least 20%, 30%, 40%, 50%, 60%, 70%, 80%, or 90% of the cells may include an alteration of a sequence in the CCAAT box target region of the human HBG1 gene, HBG2 gene or a combination thereof.

[0077] In certain embodiments, the cells disclosed herein may be used for a medicament. In certain embodiments, the cells may be for use in the treatment of 0-hemoglobinopathy. In certain embodiments, 0-hemoglobinopathy may be selected from the group consisting of sickle cell disease and beta-thalassemia.

[0078] In one aspect, the disclosure relates to compositions including a plurality of cells generated by a method including a dgRNA disclosed above, in which at least 20%, 30%, 40%, 50%, 60%, 70%, 80% or 90% of the cells include an alteration of a sequence of a CCAAT box target region of the human HBG1 or HBG2 gene or a plurality of cells generated by the method disclosed above, wherein at least 20%, 30%, 40%, 50%, 60%, 70%, 80% or 90% of the cells include an alteration of a sequence of a CCAAT box target region of the human HBG1 or HBG2. In certain embodiments, at least a portion of the plurality of cells may be within an erythroid lineage. In certain embodiments, the plurality of cells may be characterized by an increased level of fetal hemoglobin expression relative to an unmodified plurality of cells. In certain embodiments, the level of fetal hemoglobin may be increased by at least 20%, 30%, 40%, 50%, 60%, 70%, 80% or 90%. In certain embodiments, the compositions may further include a pharmaceutically acceptable carrier.

[0079] In one aspect, the disclosure relates to a population of cells modified by a genome editing system including a dgRNA described above, wherein the population of cells comprise a higher percentage of a productive indel relative to a population of cells not modified by the genome editing system. The disclosure also relates to a population of cells modified by the genome editing system including a dgRNA described above, wherein a higher percentage of the population of cells are capable of differentiating into a population of cells of an erythroid lineage that express HbF relative to a population of cells not modified by the genome editing system. In certain embodiments, the higher percentage may be at least about 15%, at least about 20%, at least about 25%, at least about 30%, or at least about 40% higher. In certain embodiments, the cells may be hematopoietic stem cells. In certain embodiments, the cells may be capable of differentiating into an erythroblast, erythrocyte, or a precursor of an erythrocyte or erythroblast. In certain embodiments, the indel may be created by a repair mechanism other than microhomology-mediated end joining (MMEJ) repair.

[0080] The disclosure also relates to the use of any of the cells disclosed herein in the manufacture of a medicament for treating β-hemoglobinopathy in a subject.

[0081] In one aspect, the disclosure relates to a method of treating a β-hemoglobinopathy in a subject in need thereof, comprising administering to the subject the cells disclosed herein. In certain embodiments, a method of treating a β-hemoglobinopathy in a subject in need thereof, may include administering a population of modified hematopoietic cells to the subject, wherein one or more cells have been altered according to the methods of altering a cell disclosed herein.

[0082] In one aspect, the disclosure relates to a genome editing system, comprising: an RNA-guided nuclease; and a first guide RNA, in which the first guide RNA may comprise a first targeting domain that is complementary to a first sequence on a side of a CCAAT box target region of a human HBG1, HBG2 gene, or a combination thereof, in which the first sequence optionally overlaps the CCAAT box target region of the human HBG1, HBG2 gene, or a combination thereof. In certain embodiments, the genome editing system may further comprise a template nucleic acid encoding an alteration of the CCAAT box target region of a human HBG1, HBG2 gene, or a combination thereof. In certain embodiments, the template nucleic acid may be a single stranded oligodeoxynucleotide (ssODN) or a double stranded oligodeoxynucleotide (dsODN). In certain embodiments, the ssODN may comprise a 5′ homology arm, a replacement sequence, and a 3′ homology arm. In certain embodiments, the homology arms may be symmetrical in length. In certain embodiments, the homology arms may be asymmetrical in length. In certain embodiments, the ssODN may comprise one or more phosphorothioate modifications. In certain embodiments, the one or more phosphorothioate modifications may be at the 5′ end, the 3′ end or a combination thereof. In certain embodiments, the ssODN may be a positive or negative strand. In certain embodiments, the alteration may be a non-naturally occurring alteration. In certain embodiments, the alteration may comprise a deletion of the CCAAT box target region. In certain embodiments, the deletion may comprise a 18 nt deletion, a 11 nt deletion, a 4 nt deletion, a 1 nt deletion, or a combination thereof. In certain embodiments, the CCAAT box target region may comprise a 18 nt target region, a 11 nt target region, a 4 nt target region, a 1 nt target region, or a combination thereof. In certain embodiments, the 5′ homology arm may be about 25 to about 200 or more nucleotides in length, e.g., at about least 25, 50, 75, 100, 125, 150, 175, or 200 nucleotides in length; the replacement sequence may comprise 0 nucleotides in length; and the 3′ homology arm may be about 25 to about 200 or more nucleotides in length, e.g., at least about 25, 50, 75, 100, 125, 150, 175, or 200 nucleotides in length. In certain embodiments, the 5′ homology arm may comprise about 50 to 100 bp, e.g., 55 to 95, 60 to 90, 70 to 90, or 80 to 90 bp, homology 5′ of the 18 nt target region and the 3′ homology arm may comprise about 50 to 100 bp, e.g., 55 to 95, 60 to 90, 70 to 90, or 80 to 90 bp, homology 3′ of the 18 nt target region. In certain embodiments, the ssODN may comprise, may consist essentially of, or may consist of SEQ ID NO:974 or SEQ ID NO:975. In certain embodiments, the 5′ homology arm may comprise about 50 to 100 bp, e.g., 55 to 95, 60 to 90, 70 to 90, or 80 to 90 bp, homology 5′ of the 11 nt target region and the 3′ homology arm may comprise about 50 to 100 bp, e.g., 55 to 95, 60 to 90, 70 to 90, or 80 to 90 bp, homology 3′ of the 11 nt target region. In certain embodiments, the ssODN may comprise, may consist essentially of, or may consist of SEQ ID NO:976 or SEQ ID NO:978. In certain embodiments, the 5′ homology arm may comprise about 50 to 100 bp, e.g., 55 to 95, 60 to 90, 70 to 90, or 80 to 90 bp, homology 5′ of the 4 nt target region and the 3′ homology arm may comprise about 50 to 100 bp, e.g., 55 to 95, 60 to 90, 70 to 90, or 80 to 90 bp, homology 3′ of the 4 nt target region. In certain embodiments, the ssODN may comprise, may consist essentially of, or may consist of a sequence selected from the group consisting of SEQ ID NO:984, SEQ ID NO:985, SEQ ID NO:986, SEQ ID NO:987, SEQ ID NO:988, SEQ ID NO:989, SEQ ID NO:990, SEQ ID NO:991, SEQ ID NO:992, SEQ ID NO:993, SEQ ID NO:994, and SEQ ID NO:995. In certain embodiments, the 5′ homology arm may comprise about 50 to 100 bp, e.g., 55 to 95, 60 to 90, 70 to 90, or 80 to 90 bp, homology 5′ of the 1 nt target region and the 3′ homology arm may comprise about 50 to 100 bp, e.g., 55 to 95, 60 to 90, 70 to 90, or 80 to 90 bp, homology 3′ of the 1 nt target region. In certain embodiments, the homology arms may be symmetrical in length. In certain embodiments, the ssODN may comprise, may consist essentially of, or may consist of SEQ ID NO:982 or SEQ ID NO:983. In certain embodiments, the alteration may be a naturally occurring alteration. In certain embodiments, the alteration may comprise a deletion or mutation of the CCAAT box target region. In certain embodiments, the CCAAT box target region may comprise a 13 nt target region, −117G>A target region, or a combination thereof. In certain embodiments, the alteration may comprise a 13 nt deletion at the 13 nt target region or a substitution from G to A at the −117G>A target region, or a combination thereof. In certain embodiments, the 5′ homology arm may comprise about 50 to 100 bp, e.g., 55 to 95, 60 to 90, 70 to 90, or 80 to 90 bp, homology 5′ of the 13 nt target region and the 3′ homology arm may comprise about 50 to 100 bp, e.g., 55 to 95, 60 to 90, 70 to 90, or 80 to 90 bp, homology 3′ of the 13 nt target region. In certain embodiments, the ssODN may comprise, may consist essentially of, or may consist of SEQ ID NO:977 or SEQ ID NO:979. In certain embodiments, the 5′ homology arm may comprise about 50 to 100 bp, e.g., 55 to 95, 60 to 90, 70 to 90, or 80 to 90 bp, homology 5′ of the 13 nt target region and the 3′ homology arm may comprise about 50 to 100 bp, e.g., 55 to 95, 60 to 90, 70 to 90, or 80 to 90 bp, homology 3′ of the 13 nt target region. In certain embodiments, the ssODN may comprise, may consist essentially of, or may consist of SEQ ID NO:980 or SEQ ID NO:981. In certain embodiments, the RNA-guided nuclease may be an S. pyogenes Cas9. In certain embodiments, the RNA-guided nuclease may be a Cpf1 variant as disclosed herein. In certain embodiments, the first targeting domain may differ by no more than 3 nucleotides from a targeting domain listed in Table 7, Table 18, Table 19 or a gRNA in Table 12, Table 19. In certain embodiments, the genome editing system may further comprise a second guide RNA, wherein the second guide RNA may comprise a second targeting domain that may be complementary to a second sequence on a side of a CCAAT box target region of a human HBG1, HBG2 gene, or a combination thereof, wherein the second sequence optionally overlaps the CCAAT box target region of the human HBG1, HBG2 gene, or a combination thereof. In certain embodiments, the RNA-guided nuclease may be a nickase, and optionally lacks RuvC activity. In certain embodiments, the genome editing system may comprise first and second RNA-guided nucleases. In certain embodiments, the first and second RNA-guided nucleases may be complexed with the first and second guide RNAs, respectively, forming first and second ribonucleoprotein complexes. In certain embodiments, the genome editing system may further comprise a third guide RNA; and optionally a fourth guide RNA, wherein the third and fourth guide RNAs may comprise third and fourth targeting domains complimentary to third and fourth sequences on opposite sides of positions of a GATA1 binding motif in BCL11A erythroid enhancer (BCL11Ae) of a human BCL11A gene, wherein one or both of the third and fourth sequences optionally overlaps the GATA1 binding motif in BCL11Ae of the human BCL11A gene. In certain embodiments, the genome editing system may further comprise a nucleic acid template encoding a deletion of the GATA1 binding motif in BCL11Ae. In certain embodiments, the RNA-guided nuclease may be an S. pyogenes Cas9. In certain embodiments, the RNA-guided nuclease may be a nickase, and optionally lacks RuvC activity. In certain embodiments, the third targeting domain may be complimentary to a sequence within 1000 nucleotides upstream of the GATA1 binding motif in BCL11Ae. In certain embodiments, the third targeting domain may be complimentary to a sequence within 100 nucleotides upstream of the GATA1 binding motif in BCL11Ae. In certain embodiments, one of the third and fourth targeting domains may be complimentary to a sequence within 100 nucleotides downstream of the GATA1 binding motif in BCL11Ae. In certain embodiments, the fourth targeting domain may be complimentary to a sequence within 50 nucleotides downstream of the GATA1 binding motif in BCL11Ae. In certain embodiments, at least one of the third and fourth targeting domains may differ by no more than 3 nucleotides from a targeting domain listed in Table 9. In certain embodiments, genome editing system may comprise first and second RNA-guided nucleases. In certain embodiments, the first and second RNA-guided nucleases may be complexed with the third and fourth guide RNAs, respectively, forming third and fourth ribonucleoprotein complexes.

[0083] In one aspect, the disclosure relates to a method of altering a cell comprising contacting a cell with a genome editing system. In certain embodiments, the step of contacting the cell with the genome editing system may comprise contacting the cell with a solution comprising first and second ribonucleoprotein complexes. In certain embodiments, the step of contacting the cell with the solution may further comprise electroporating the cells, thereby introducing the first and second ribonucleoprotein complexes into the cell. In certain embodiments, the method of altering a cell may further comprise contacting the cell with a genome editing system, wherein the step of contacting the cell with the genome editing system may comprise contacting the cell with a solution comprising first, second, third, and optionally, fourth ribonucleoprotein complexes. In certain embodiments, the step of contacting the cell with the solution may further comprise electroporating the cells, thereby introducing the first, second, third, and optionally, fourth ribonucleoprotein complexes into the cell. In certain embodiments, the cell may be capable of differentiating into an erythroblast, erythrocyte, or a precursor of an erythrocyte or erythroblast. In certain embodiments, the cell may be a CD34+ cell.

[0084] In one aspect, the disclosure relates to a CRISPR-mediated method of altering a cell, comprising: introducing a first DNA single strand break (SSB) or double strand break (DSB) within a genome of the cell between positions c.−106 to −120 of a human HBG1 or HBG2 gene; and optionally introducing a second SSB or DSB within the genome of the cell between positions c.−106 to −120 of the human HBG1 or HBG2 gene, wherein the first and second SSBs or DSBs may be repaired by the cell in a manner that alters a CCAAT box target region of the human HBG1 or HBG2 gene. In certain embodiments, the first and second SSBs or DSBs may be repaired by the cell in a manner that results in the alteration of a CCAAT box target region of the human HBG1 or HBG2 gene. In certain embodiments, the CRISPR-mediated method may further comprise a template nucleic acid encoding the alteration of the CCAAT box target region of a human HBG1, HBG2 gene, or a combination thereof. In certain embodiments, the template nucleic acid may be a single stranded oligodeoxynucleotide (ssODN). In certain embodiments, the ssODN may comprise a 5′ homology arm, a replacement sequence, and a 3′ homology arm. In certain embodiments, the ssODNs may be a positive or negative strand. In certain embodiments, the alteration may be a non-naturally occurring alteration. In certain embodiments, the first and second SSBs or DSBs may be repaired by the cell in a manner that results in the formation of at least one of an indel, a deletion, or an insertion in the CCAAT box target region of the human HBG1 or HBG2 gene. In certain embodiments, the CCAAT box target region may comprise a 18 nt target region, a 11 nt target region, a 4 nt target region, a 1 nt target region, or a combination thereof. In certain embodiments, the 5′ homology arm may be about 25 to about 200 nucleotides or more in length, e.g., at least about 25, 50, 75, 100, 125, 150, 175, or 200 nucleotides in length; the replacement sequence may comprise 0 nucleotides in length; and the 3′ homology arm may be about 25 to about 200 nucleotides or more in length, e.g., at least about 25, 50, 75, 100, 125, 150, 175, or 200 nucleotides in length. In certain embodiments, the 5′ homology arm may comprise about 50 to 100 bp, e.g., 55 to 95, 60 to 90, 70 to 90, or 80 to 90 bp, homology 5′ of the 18 nt target region, the 11 nt target region, the 4 nt target region, or the 1 nt target region and the 3′ homology arm may comprise about 50 to 100 bp, e.g., 55 to 95, 60 to 90, 70 to 90, or 80 to 90 bp, homology 3′ of 18 nt target region, the 11 nt target region, the 4 nt target region, or the 1 nt target region. In certain embodiments, the ssODN may comprise, may consist essentially of, or may consist of a sequence selected from the group consisting of SEQ ID NO:974, SEQ ID NO:975, SEQ ID NO:976, SEQ ID NO:978, SEQ ID NO:984, SEQ ID NO:985, SEQ ID NO:986, SEQ ID NO:987, SEQ ID NO:988, SEQ ID NO:989, SEQ ID NO:990, SEQ ID NO:991, SEQ ID NO:992, SEQ ID NO:993, SEQ ID NO:994, SEQ ID NO:995, SEQ ID NO:982 and SEQ ID NO:983. In certain embodiments, the alteration may be a non-naturally occurring alteration. In certain embodiments, the first and second SSBs or DSBs may be repaired by the cell in a manner that results in the formation of at least one of an indel, a deletion, or an insertion in the CCAAT box target region of the human HBG1 or HBG2 gene. In certain embodiments, the CCAAT box target region may comprise a 13 nt target region, −117G>A target region, or a combination thereof. In certain embodiments, the alteration may comprise a 13 nt deletion at the 13 nt target region or a substitution from G to A at the −117G>A target region, or a combination thereof. In certain embodiments, the 5′ homology arm may comprise about 50 to 100 bp, e.g., 55 to 95, 60 to 90, 70 to 90, or 80 to 90 bp, homology 5′ of the 13 nt target region or the −117G>A target region and the 3′ homology arm may comprise about 50 to 100 bp, e.g., 55 to 95, 60 to 90, 70 to 90, or 80 to 90 bp, homology 3′ of the 13 nt target region or the −117G>A target region. In certain embodiments, the ssODN may comprise, may consist essentially of, or may consist of a sequence selected from the group consisting of SEQ ID NO:977 or SEQ ID NO:979. SEQ ID NO:980 or SEQ ID NO:981.

[0085] In one aspect, the disclosure relates to a composition that may comprise a plurality of cells generated by a method of altering a cell disclosed herein, wherein at least 20%, 30%, 40%, 50%, 60%, 70%, 80% or 90% of the cells may comprise an alteration of a sequence of a CCAAT box target region of the human HBG1 gene, HBG2 gene, or a combination thereof. In certain embodiments, the alteration may comprise a 18 nt deletion, a 11 nt deletion, a 4 nt deletion, a 1 nt deletion, a 13 nt deletion, a substitution from G to A at the −117, of the human HBG1 gene, HBG2 gene, or a combination thereof. In certain embodiments, at least a portion of the plurality of cells may be within an erythroid lineage. In certain embodiments, the plurality of cells may be characterized by an increased level of fetal hemoglobin expression relative to an unmodified plurality of cells. In certain embodiments, the level of fetal hemoglobin may be increased by at least 20%, 30%, 40%, 50%, 60%, 70%, 80% or 90%. In certain embodiments, the composition may further comprise a pharmaceutically acceptable carrier.

[0086] In one aspect, the disclosure relates to a cell comprising a synthetic genotype generated by a method of altering a cell disclosed herein, wherein the cell may comprise a 18 nt deletion, a 11 nt deletion, a 4 nt deletion, a 1 nt deletion, a 13 nt deletion, a substitution from G to A at the −117, of the human HBG1 gene, HBG2 gene, or a combination thereof.

[0087] In one aspect, the disclosure relates to a cell comprising at least one allele of the HBG locus generated by a method of altering a cell disclosed herein, wherein the cell may encode a 18 nt deletion, a 11 nt deletion, a 4 nt deletion, a 1 nt deletion, a 13 nt deletion, a substitution from G to A at the −117, of the human HBG1 gene, HBG2 gene, or a combination thereof.

[0088] In one aspect, the disclosure relates to an AAV vector that may comprise a template nucleic acid encoding a non-naturally occurring alteration of a CCAAT box target region of a human HBG1, HBG2 gene, or a combination thereof. In certain embodiments, the template nucleic acid may be a single stranded oligodeoxynucleotide (ssODN). In certain embodiments, the CCAAT box target region may comprise a 18 nt target region, a 11 nt target region, a 4 nt target region, a 1 nt target region, or a combination thereof. In certain embodiments, the ssODN may comprise a 5′ homology arm, a replacement sequence, and a 3′ homology arm. In certain embodiments, the 5′ homology arm may be about 25 to about 200 or more nucleotides in length, e.g., at least about 25, 50, 75, 100, 125, 150, 175, or 200 nucleotides in length; the replacement sequence may comprise 0 nucleotides in length; and the 3′ homology arm may be about 25 to about 200 or more nucleotides in length, e.g., at least about 25, 50, 75, 100, 125, 150, 175, or 200 nucleotides in length. In certain embodiments, the 5′ homology arm may comprise about 50 to 100 bp, e.g., 55 to 95, 60 to 90, 70 to 90, or 80 to 90 bp, homology 5′ of the 18 nt target region, the 11 nt target region, the 4 nt target region, or the 1 nt target region and the 3′ homology arm may comprise about 50 to 100 bp, e.g., 55 to 95, 60 to 90, 70 to 90, or 80 to 90 bp, homology 3′ of 18 nt target region, the 11 nt target region, the 4 nt target region, or the 1 nt target region. In certain embodiments, the ssODN may comprise, may consist essentially of, or may consist of a sequence selected from the group consisting of SEQ ID NO:974-976, SEQ ID NO:978, SEQ ID NO:982-995.

[0089] In one aspect, the disclosure relates to a nucleotide sequence comprising a template nucleic acid encoding a non-naturally occurring alteration of a CCAAT box target region of a human HBG1, HBG2 gene, or a combination thereof. In certain embodiments, the template nucleic acid may be a single stranded oligodeoxynucleotide (ssODN) or a double stranded oligodeoxynucleotide (dsODN) comprising the alteration. In certain embodiments, the CCAAT box target region may comprise a 18 nt target region, a 11 nt target region, a 4 nt target region, a 1 nt target region, or a combination thereof. In certain embodiments, the ssODN may comprise a 5′ homology arm, a replacement sequence, and a 3′ homology arm. In certain embodiments, the 5′ homology arm may be about 25 to about 200 or more nucleotides in length, e.g., at least about 25, 50, 75, 100, 125, 150, 175, or 200 nucleotides in length; the replacement sequence may comprise 0 nucleotides in length; and the 3′ homology arm may be about 25 to about 200 or more nucleotides in length, e.g., at least about 25, 50, 75, 100, 125, 150, 175, or 200 nucleotides in length. In certain embodiments, the 5′ homology arm may comprise about 50 to 100 bp, e.g., 55 to 95, 60 to 90, 70 to 90, or 80 to 90 bp, homology 5′ of the 18 nt target region, the 11 nt target region, the 4 nt target region, or the 1 nt target region and the 3′ homology arm may comprise about 50 to 100 bp, e.g., 55 to 95, 60 to 90, 70 to 90, or 80 to 90 bp, homology 3′ of 18 nt target region, the 11 nt target region, the 4 nt target region, or the 1 nt target region. In certain embodiments, the ssODN may comprise, may consist essentially of, or may consist of a sequence selected from the group consisting of SEQ ID NO:974-976, SEQ ID NO:978, SEQ ID NO:982-995.

[0090] In one aspect, the disclosure relates to a cell comprising a synthetic genotype, wherein the cell may comprise a 18 nt deletion, a 11 nt deletion, a 4 nt deletion, a 1 nt deletion, a 13 nt deletion, a substitution from G to A at the −117, of the human HBG1 gene, HBG2 gene, or a combination thereof.

[0091] In one aspect, the disclosure relates to a composition, comprising a population of cells generated by a method of altering a cell disclosed herein, wherein the cells comprise a higher frequency of an alteration of a sequence of a CCAAT box target region of the human HBG1 gene, HBG2 gene, or a combination thereof relative to an unmodified population of cells. In certain embodiments, the higher frequency is at least about 10%, 20%, 30%, 40%, 50%, 60%, 70%, 80% or 90% higher. In certain embodiments, the alteration comprises a 18 nt deletion, a 11 nt deletion, a 4 nt deletion, a 1 nt deletion, a 13 nt deletion, a substitution from G to A at the −117, of the human HBG1 gene, HBG2 gene, or a combination thereof. In certain embodiments, at least a portion of the population of cells are within an erythroid lineage.

[0092] This listing is intended to be exemplary and illustrative rather than comprehensive and limiting. Additional aspects and embodiments may be set out in, or apparent from, the remainder of this disclosure and the claims.

### BRIEF DESCRIPTION OF THE DRAWINGS

[0093] The accompanying drawings are intended to provide illustrative, and schematic rather than comprehensive, examples of certain aspects and embodiments of the present disclosure. The drawings are not intended to be limiting or binding to any particular theory or model, and are not necessarily to scale. Without limiting the foregoing, nucleic acids and polypeptides may be depicted as linear sequences, or as schematic two- or three-dimensional structures; these depictions are intended to be illustrative rather than limiting or binding to any particular model or theory regarding their structure.

[0094] FIG. 1 depicts, in schematic form, HBG1 and HBG2 gene(s) in the context of the β-globin gene cluster on human chromosome 11. FIG. 1. Each gene in the β-globin gene cluster is transcriptionally regulated by a proximal promoter. While not wishing to be bound by any particular theory, it is generally thought that A_{γ} and/or G_{γ} expression is activated by engagement between the proximal promoter with the distal strong erythroid-specific enhancer, the locus control region (LCR). Long-range transactivation by the LCR is thought to be mediated by alteration of chromatin configuration/confirmation. The LCR is marked by 4 erythroid specific Dnase I hypersensitive sites (HS1-4) and 2 distal enhancer elements (5′ HS and 3′ HS1). D-like gene globin gene expression is regulated in a developmental stage-specific manner, and expression of globin genes changes coincide with changes in the main site of blood production.

[0095] FIGS. 2A-2B depict HBG1 and HBG2 genes, coding sequences (CDS) and small deletions and point mutations in and upstream of the HBG1 and HBG2 proximal promoters that have been identified in patients and associated with elevation of fetal hemoglobin (HbF). Core elements within the proximal promoters (CAAT box, 13 nt sequence) that have been deleted in some patients with hereditary persistence of fetal hemoglobin (HPFH). The ‘target sequence’ region of each locus, which has been screened for gRNA binding target sites, is also identified.

[0096] FIGS. 3A-C show data from gRNA screening for incorporation of the 13 nt deletion in human K562 erythroleukemia cells. FIG. 3A Gene editing as determined by T7E1 endonuclease assay analysis (referred to interchangeably as a “T7E1 analysis”) of HBG1 and HBG2 locus-specific PCR products amplified from genomic DNA extracted from K562 cells after electroporation with DNA encoding S. pyogenes-specific gRNAs and plasmid DNA encoding S. pyogenes Cas9. FIG. 3B Gene editing as determined by DNA sequence analysis of PCR products amplified from the HBG1 locus in genomic DNA extracted from K562 cells after electroporation with DNA encoding the indicated gRNA and Cas9 plasmid. FIG. 3C Gene editing as determined by DNA sequence analysis of PCR products amplified from the HBG2 locus in genomic DNA extracted from K562 cells after electroporation with DNA encoding the indicated gRNA and Cas9 plasmid. For FIG. 3B-C, the types of editing events (insertions, deletions) and subtypes of deletions (13 nt target partially [12 nt HPFH] or fully [13-26 nt HPFH] deleted, other sequences deleted [other deletions]) are indicated by the differently shaded/patterned bars.

[0097] FIGS. 4A-C depict results of gene editing in human cord blood (CB) and human adult CD34+ cells after electroporation with RNPs complexed to in vitro transcribed S. pyogenes gRNAs that target a specific 13 nt sequence for deletion (HBG sgRNAs Sp35 and Sp37). FIG. 4A depicts the percentage of indels detected by T7E1 analysis of HBG1 and HBG2 specific PCR products amplified from gDNA extracted from CB CD34+ cells treated with the indicated RNPs or donor matched untreated control cells (n=3 CB CD34+ cells, 3 separate experiments). Data shown represent the mean and error bars correspond to standard deviation across the 3 separate donors/experiments. FIG. 4B depicts the percentage of indels detected by T7E1 analysis of HBG2 specific PCR product amplified from gDNA extracted from CB CD34+ cells or adult CD34+ cells treated with the indicated RNPs or donor matched untreated control cells (n=3 CB CD34+ cells, n=3 mobilized peripheral blood (mPB) CD34+ cells, 3 separate experiments). Data shown represent the mean and error bars correspond to standard deviation across the 3 separate donors/experiments. FIG. 4C (Top panel) depicts indels as detected by T7E1 analysis of HBG2 PCR products amplified from gDNA extracted from human CB CD34+ cells electroporated with HBG Sp35 RNP or HBG Sp37 RNP+/−ssODN (unmodified or with PhTx modified 5′ and 3′ ends). The lower left panel shows the level of gene editing as determined by Sanger DNA sequence analysis of gDNA from cells edited with HBG Sp37 RNP and ssODN. The lower right panel shows the specific types of deletions detected within total deletions.

[0098] FIGS. 5A-B depict gene editing of HBG in adult human mobilized peripheral blood (mPB) CD34+ cells and induction of fetal hemoglobin in erythroid progeny of RNP treated cells after electroporation of mPB CD34+ cells with HBG Sp37 RNP+/−ssODN encoding the 13 nt deletion. FIG. 5A depicts the percentage of indels detected by T7E1 analysis of HBG2 PCR product amplified from gDNA extracted from mPB CD34+ cells treated with the RNP or donor matched untreated control cells. FIG. 5B depicts the fold change in HBG mRNA expression in day 7 erythroblasts that were differentiated from RNP treated and untreated donor matched control mPB CD34+ cells. mRNA levels are normalized to GAPDH and calibrated to the levels detected in untreated controls on the corresponding days of differentiation.

[0099] FIGS. 6A-B depict the ex vivo differentiation potential of RNP treated and untreated mPB CD34+ cells from the same donor. FIG. 6A shows hematopoietic myeloid/erythroid colony forming cell (CFC) potential, where the number and subtype of colonies are indicated (GEMM: granulocyte-erythroid-monocyte-macrophage colony, E: erythroid colony, GM: granulocyte-macrophage colony, M: macrophage colony, G: granulocyte colony). FIG. 6B depicts the percentage of Glycophorin A expressed over the time course of erythroid differentiation as determined by flow cytometry analysis at the indicated time points and for the indicated samples.

[0100] FIG. 7A depicts indels detected by T7E1 analysis of HBG PCR product amplified from gDNA extracted from human mPB CD34+ cells treated with HBG RNPs (D10A paired nickases). For a subset of samples, cells also received ssODN encoding the 13 nt deletion plus silent SNPs to monitor for HDR (ssODN). FIG. 7B depicts DNA sequencing analysis for select subset of samples shown in FIG. 7A. The indels were subdivided according to the type of indel (insertion, 13 nt deletion, or other deletion).

[0101] FIG. 8A depicts the indels at the HBG target site after electroporation of mPB CD34+ cells with the indicated pairs of gRNAs complexed in D10A nickase and WT RNP pairs. FIG. 8B depicts the large deletion events (e.g. deletion of HBG2) after electroporation of mPB CD34+ cells with the indicated pairs of gRNAs complexed in D10A nickase and WT RNPs. FIG. 8C depicts DNA sequencing analysis and the subtypes of events (insertions, deletions) detected in gDNA from mPB CD34+ cells treated with paired D10A nickase pairs. FIG. 8D depicts DNA sequencing analysis and the subtypes of events (insertions, deletions) detected in gDNA from mPB CD34+ cells treated with paired WT RNP pairs.

[0102] FIG. 9 depicts the summary of HbF protein and mRNA expression in the progeny of mPB CD34+ cells treated with paired RNPs targeting HBG, for the experiments shown in FIGS. 7 and 8. HbF protein (by HPLC analysis) and HbF mRNA expression (ddPCR analysis) were evaluated in erythroid progeny of RNP treated human mPB CD34+ cells (background levels of HbF detected in donor matched untreated controls were subtracted from the levels detected in progeny of RNP treated CD34+ cells).

[0103] FIGS. 10A-H depict the indel frequencies and ex vivo and in vivo short-term hematopoietic potential of CD34+ cells after treatment with different concentrations (0, 2.5, 3.7 μM) of paired D10A nickase RNPs (SpA+Sp85). Indels were evaluated by T7E1 analysis (FIG. 10A) and by Illumina sequencing analysis (insertions and deletions, FIG. 10B). FIG. 10C depicts the % of HbF protein detected by HPLC analysis (% HbF=100%×HbF/(HbF+HbA). FIG. 10D depicts the hematopoietic activity of the RNP treated and donor matched untreated control CD34+ cells in colony forming cell (CFC) assays. CFCs shown are per thousand CD34+ cells plated. FIG. 10E depicts human blood CD45+ cell reconstitution of the peripheral blood in immunodeficient mice (NSG) 1 month after transplantation with donor matched human mPB CD34+ that were either untreated (0 μM), or treated with one of two doses (2.5 and 3.75 μM) of D10A RNP and paired gRNAs. FIG. 10F depicts human blood CD45+ cell reconstitution of the peripheral blood in immunodeficient mice (NSG) 2 months after transplantation. FIGS. 10G and 10H depict the lineage distributions following human CD45+ blood cell reconstitution of NSG mice at 1 month (FIG. 10G) and 2 months (FIG. 10H).

[0104] FIG. 11A correlates HbF levels as assayed by HPLC and indel frequency as assessed by T7E1 analysis for two D10A nickase RNP pairs (SP37+SPB and SP37+SPA) delivered at the indicated concentrations to mPB CD34+ cells. HbF levels were analyzed in erythroid progeny (day 18) of edited CD34+ cells. HbF protein detected in donor-matched untreated controls were subtracted from edited samples. FIG. 11B depicts indel rates overlaid on hematopoietic colony forming cell (CFC) activity associated with CD34+ cells treated with the indicated D10A nickase pairs or untreated controls. FIG. 11C depicts human CD45+ blood cell reconstitution of immunodeficient NSG mice one month after transplantation of mPB CD34+ cells treated with indicated D10 RNP nickase pairs at the concentrations given or donor matched untreated controls. FIG. 11D depicts the human blood lineage distribution detected in the human CD45+ fraction in mouse peripheral blood one month post-transplant.

[0105] FIG. 12 depicts a target site for derepression of HbF, the GATA1 motif of the +58 DNase I hypersensitive site (DHS) erythroid specific enhancer of BCL11A (BCL11Ae) (genomic coordinates: chr2: 60,495,265 to 60,495,270).

[0106] FIG. 13A depicts the percentage of indels detected by T7E1 endonuclease analysis of BCL11A PCR products amplified from gDNA extracted from CB CD34+ cells treated with the indicated RNP+/−ssODN or donor matched untreated control cells. Data shown represent the mean of three 3 separate donors/experiments. FIG. 13B depicts indels detected by T7E1 endonuclease analysis of BCL11A PCR products amplified from gDNA extracted from CB CD34+ cells treated with the indicated WT RNP (single gRNA targeting the BCL11A erythroid enhancer complexed to WT S. pyogenes Cas9 having both RuvC and HNH activity) or paired nickase RNP (paired gRNAs targeting the BCL11A erythroid enhancer complexed to S. pyogenes Cas9 nickases sharing the same HNH single stranded cutting activity (e.g. D10A), as well as the hematopoietic activity of cells in each condition.

[0107] FIG. 14A depicts the editing frequency of BCL11Ae (using single gRNA approach targeting the GATA1 motif) in adult human BM CD34+ cells. FIG. 14B depicts the monoallelic and bialleleic editing detected in hematopoietic colonies (GEMMs, clonal progeny of BCL11Ae RNP treated CD34+ cells) as determined by DNA sequencing analysis. FIG. 14C depicts the kinetics of erythroblast maturation (enucleation as determined by DRAQ5⁻ cells detected by flow cytometry analysis). FIG. 14D depicts the acquisition of erythroid phenotype (Glycophorin A⁺ cells) in differentiated control and RNP-treated BM CD34⁺ cells, while FIG. 14E shows the fold increase in HbF⁺ cells as determined by flow cytometry analysis relative to HbF+ cells in untreated donor matched control samples.

[0108] FIGS. 15A-C depict gene editing of BCL11Ae in adult human mPB CD34+ cells and induction of fetal hemoglobin in erythroid progeny of RNP and ssODN treated cells after electroporation of mPB CD34+ cells with BCL11Ae RNP+ nonspecific ssODN. FIG. 15A depicts the percentage of indels detected by T7E1 analysis of HBG2 PCR product amplified from gDNA extracted from mPB CD34+ cells treated with the BCL11Ae RNP and nonspecific ssODN or donor matched untreated control cells. FIG. 15B depicts the fold change in HBG mRNA expression in day 10 erythroblasts that were differentiated from BCL11Ae RNP treated and untreated donor matched control mPB CD34+ cells (mRNA levels are normalized to GAPDH and calibrated to the levels detected in untreated controls on the corresponding days of differentiation). FIG. 15C depicts the percentage of Glycophorin A expressed over the time course of erythroid differentiation of mPB CD34+ cells +/− treatment with BCL11Ae RNP and nonspecific ssODN, as determined by flow cytometry analysis at the indicated time points and for the indicated samples.

[0109] FIG. 16 depicts the percentage of indels detected by next generation sequencing (NGS) of the HBG PCR product amplified from gDNA extracted from hematopoietic stem/progenitor cells (HSPCs) treated with Cas9 complexed with the chemically synthesized guide RNA OLI7066 (SEQ ID NO:970, Table 10) (“OLI7066-RNP”) at a concentration of 16 μM. Various indels were identified including HBG Δ−102:−121, HBG Δ−114:−124, HBG Δ−116, HBG −114+T, HBG −116+G, HBG Δ−112:−115, HBG Δ−113:−115, HBG Δ−114:−115, HBG Δ−115, HBG Δ−102:−114 (the naturally occurring 13 nt deletion).

[0110] FIGS. 17A-D depict expression levels of G gamma (Gγ)-globin, A gamma (Aγ)-globin chain (or AG gamma (AGγ)-globin resulting from the 4.9 kb deletion) as determined by [gamma chain]/[all-gamma chains+beta chain] compared to relative indels carried at HBG1 or HBG2 as measured by UPLC analysis in the erythroid progeny of single HSPC that were electroporated with Cas9 complexed with the gRNA OLI7066 (SEQ ID NO:970) (“OLI7066-RNP”) (Table 10). FIG. 17A depicts AgammaT (AγT)-globin chain expression as determined by [AγT-globin chain]/[all-gamma chains+beta chain] for clones carrying the indicated indels on the corresponding HBG1 allele (HBG1 Δ−115, HBG1 Δ−114:−115, HBG1 Δ−113:−115, HBG1 Δ−112:−115, HBG1 Δ−102:−114, HBG1 Δ−104:−121, HBG1 Δ−116). FIG. 17B depicts G gamma (Gγ)-globin chain expression as determined by [Gγ-gamma chain]/[all-gamma chains+beta chain] for clones carrying the indicated indels on an HBG2 allele (HBG2 Δ−115, HBG2 Δ−114:−115, HBG2 Δ−113:−115, HBG2 Δ−112:−115, HBG2 Δ−102:−114, HBG2 Δ−104:−121, HBG2 Δ−116). To insure that the analysis of G gamma (Gγ)-globin induction is the result of a single edited allele, only clones with monoallelic editing of HBG2, or with a deletion of one of the HBG2 allele were analyzed (resulting from the 4.9 kb deletion). FIG. 17C depicts AG gammaT (AGγT)-globin chain expression as determined by [AGγT-gamma chain]/[all-gamma chains+beta chain] for clones carrying the indicated indels on the corresponding HBG1/2 allele (HBG1/2 Δ−115, HBG1/2 Δ−114:−115, HBG1/2 Δ−113:−115, HBG1/2 Δ−112:−115, HBG1/2 Δ−102:−114, HBG1/2 Δ−104:−121, HBG1/2 Δ−116). FIG. 17D depicts AGgammaI (AGγI)-globin chain expression as determined by [AGγI-gamma chain]/[all-gamma chains+beta chain] for clones carrying the indicated indels on the corresponding HBG1/2 allele (HBG1/2 Δ−115, HBG1/2 Δ−114:−115, HBG1/2 Δ−113:−115, HBG1/2 Δ−112:−115, HBG1/2 Δ−102:−114, HBG1/2 Δ−104:−121, HBG1/2 Δ−116).

[0111] FIG. 18 depicts, in schematic form, HBG1 and HBG2 gene(s) in the context of the β-globin gene cluster on human chromosome 11. The schematic shows the CCAAT box target sites at HBG1 and HBG2. Due to the homology within this region, a single guide RNA, such as OLI8394 (SEQ ID NO:971), complexed to an RNA nuclease (e.g., Cas9) will cut at both HBG1 and HBG2. The editing outcomes following delivery of Cas9 complexed to OLI8394 (“OLI8394-RNP”) vary and result in different size deletions or insertions. Single stranded oligodeoxynucleotides (ssODN) were designed to provide a template that copies the desired indel signature at the CCAAT box (Table 11). The ssODN “encodes” the respective deletion with sequence homology arms flanking the absent sequence to create a perfect deletion.

[0112] FIGS. 19A-G depict results from gene editing of the CCAAT box target region of HBG of adult human CD34+ cells from mPB (“mPB CD34+ cells”) electroporated with 2 μM OLI8394-RNP or OLI7066-RNP and 2.5 μM of various ssODNs (Table 11). FIG. 19A depicts the percentage of indels detected by sequencing the HBG PCR product 72 hours after electroporation with OLI8394-RNP and ssODN OLI16413 (“−11 nt+strand”) or ssODN OLI16411 (“−11 nt−strand”). FIG. 19B depicts the percentage of the precise “−11 nt deletion” to the total indels detected by sequencing the HBG PCR product 72 hours after electroporation with OLI8394-RNP and ssODN OLI16413 (“−11 nt+strand”) or ssODN OLI16411 (“−11 nt−strand”). FIG. 19C depicts the percentage of indels detected by sequencing the HBG PCR product 72 hours after electroporation with OLI8394-RNP and ssODN OLI16430 (“−4 nt+strand”) or ssODN OLI16424 (“−4 nt−strand”). The percentage of the precise −4 nt deletion (i.e., Δ−112:−115) is distinguished from other indels. FIG. 19D depicts the percentage of indels detected by sequencing the HBG PCR product 72 hours after electroporation with OLI8394-RNP and ssODN OLI16418 (“−1 nt+strand”) or ssODN OLI16417 (“−1 nt−strand”). The percentage of the precise −1 nt deletion (i.e., Δ−116) is distinguished from other indels. FIG. 19E depicts the percentage of indels detected by sequencing the HBG PCR product 72 hours after electroporation with OLI8394-RNP and ssODN OLI16409 (“−18 nt+strand”) or ssODN OLI16410 (“−18 nt−strand”). The percentage of the precise −18 nt deletion (i.e., Δ−104:−121) is distinguished from other indels. FIG. 19F depicts the percentage of indels detected by sequencing the HBG PCR product 72 hours after electroporation with OLI7066-RNP and ssODN OLI16414 (“−13 nt+strand”) or ssODN OLI16412 (“−13 nt−strand”). The percentage of the precise −13 nt deletion (i.e., Δ−102:−114) is distinguished from other indels FIG. 19G depicts the percentage of indels detected by sequencing the HBG PCR product 72 hours after electroporation with OLI8394-RNP and ssODN OLI16416 (“−117 G>A+strand”) or ssODN OLI16415 (“−117 G>A−strand”). The percentage of reads with the −117 G>A substitution, with or without indels are distinguished from other reads.

[0113] FIGS. 20A-B depict expression levels of gamma-globin chains over total beta-like globin chains (gamma chains/[gamma chains+beta chain]) as measured by UPLC analysis on the erythroid progeny of mPB CD34+ cells that were electroporated with OLI8394-RNP or OLI7066-RNP and various ssODNs (Table 11). FIG. 20A depicts the percentage of gamma-globin chains over total beta-like globin chains (gamma chains/[gamma chains+beta chain]) as measured by UPLC after electroporation with (i) OLI8394-RNP and OLI7066-RNP alone, (ii) OLI8394-RNP and ssODN OLI16430 (“−4 nt+strand”), ssODN OLI16424 (“−4 nt−strand”), ssODN OLI16413 (“−11 nt+strand”), or ssODN OLI16411 (“−11 nt−strand”), and (iii) OLI7066-RNP and ssODN OLI16414 (“−13 nt+strand”) or ssODN OLI16412 (“−13 nt−strand”). FIG. 20B depicts the percentage of gamma-globin chains over total beta-like globin chains (gamma chains/[gamma chains+beta chain]) as measured by UPLC after electroporation with OLI8394-RNP and ssODN OLI16418 (“−1 nt+strand”), ssODN OLI16417 (“−1 nt−strand”), ssODN OLI16416 (“−117 G>A+strand”), ssODN OLI16415 (“−117 G>A−strand”), ssODN OLI16409 (“−18 nt+strand”), or ssODN OLI16410 (“−18 nt−strand”).

[0114] FIGS. 21A-D depict results from gene editing from mPB CD34+ cells electroporated with 2 μM OLI8394-RNP and ssODN OLI16424 (“−4 nt−strand”) (Table 11) at doses ranging from 0.625 μM to 10 μM. FIG. 21A depicts the percentage of indels detected by sequencing the HBG PCR product 72 hours after electroporation. FIG. 21B depicts frequency of 4.9 kb deletions detected by ddPCR between HBG1 and HBG2 after electroporation. FIG. 21C depicts the percentage viability of adult human CD34+ cells from mPB 48 hours after electroporation. FIG. 21D depicts the percentage of gamma-globin chains over total beta-like globin chains (gamma chains/[gamma chains+beta chain]) as measured by UPLC analysis of the cell lysates from the erythroid progeny of electroporated cells.

[0115] FIGS. 22A-D depict results from gene editing from mPB CD34+ cells electroporated with indicated doses of OLI8394-RNP and indicated doses of ssODN OLI16424 (“−4 nt−strand”) (Table 11). FIG. 22A depicts the percentage of indels detected by sequencing the HBG PCR product 72 hours after electroporation with indicated doses (2, 4, or 8 μM) of OLI8394-RNP and indicated doses (0, 1.25, 2.5, or 5 μM) of ssODN OLI16424 (“−4 nt−strand”). FIG. 22B depicts the percentage of −4 nt deletions (“−112:−115 deletions”) detected by next generation sequencing (NGS) of the HBG PCR product after electroporation with indicated doses (2, 4, or 8 μM) of OLI8394-RNP and indicated doses (0, 1.25, 2.5, or 5 μM) of ssODN OLI16424 (“−4 nt−strand”). FIG. 22C depicts frequency of 4.9 kb deletions between HBG1 and HBG2 after electroporation with the indicated doses (2, 4, or 8 μM) of OLI8394-RNP and indicated doses (0, 1.25, 2.5, or 5 μM) of ssODN OLI16424 (“−4 nt−strand”). Deletions were measured via ddPCR. FIG. 22D depicts the percentage of gamma-globin chains over total beta-like globin chains (gamma chains/[gamma chains+beta chain]) as measured by UPLC analysis of the cell lysates from the erythroid progeny of mPB CD34+ cells after electroporation with the indicated doses (2, 4, or 8 μM) of OLI8394-RNP and indicated doses (0, 1.25, 2.5, or 5 μM) of ssODN OLI16424 (“−4 nt−strand”).

[0116] FIGS. 23A-B depict a schematic of and results provided by ssODN templates with symmetrical and asymmetrical homology arms. FIG. 23A depicts the CCAAT box target sites at HBG1 and HBG2 that is targeted by OLI8394 (SEQ ID NO:971) and OLI7066 (SEQ ID NO:970). ssODNs with symmetrical or asymmetrical arms were designed to provide a template that copies the −4 nt deletion (HBG-112:−115) of HBG1 and HBG2 (Table 11). The ssODN “encodes” the respective deletion with sequence homology arms flanking the absent sequence to create a perfect deletion at HBG-112:−115. FIG. 23B depicts the percentage of indels detected by sequencing the HBG PCR product 72 hours after electroporation of mPB CD34+ cells with 2 μM of OLI8394-RNP and 2.5 μM of various ssODNs, OLI16424 (“90/90”), OLI16419 (“40/80”) or OLI16421 (“50/50”), that “encode” the 4 nt deletion (HBG-112:−115) (Table 11).

[0117] FIG. 24 depicts the percentage of indels detected by sequencing the HBG PCR product 72 hours after electroporation of mPB CD34+ cells with D10ACas9 complexed with Sp37 and SpA gRNAs (Table 12) (“sp37-D10A-RNP+spA-D10A-RNP”) alone or with ssODN OLI16424 (“−4 nt−strand”) (Table 11). The percentage of the precise −4 nt deletion (i.e., Δ−112:−115) is distinguished from other indels.

[0118] FIG. 25 depicts gene editing of HBG of mPB CD34+ cells electroporated with variants of Acidaminococcus sp. Cpf1 (“AsCpf1”), namely His-AsCpf1-nNLS (SEQ ID NO:1000) and His-AsCpf1-sNLS-sNLS (SEQ ID NO:1001) complexed with the guide RNA HBG1-1 (OLI13620) (Table 13) (“His-AsCpf1-nNLS_HBG1-1 RNP” and “His-AsCpf1-sNLS-sNLS_HBG1-1 RNP”). The RNP were electroporated at 5 μM or 20 μM.

[0119] FIGS. 26A-C depict gene editing of HBG of mPB CD34+ cells electroporated with His-AsCpf1-sNLS-sNLS_HBG1-1 RNP alone or with various ssODNs. FIG. 26A depicts the percentage of indels detected by sequencing the HBG PCR product 72 hours after electroporation with His-AsCpf1-sNLS-sNLS_HBG1-1 RNP alone or with OLI164324 (“−4 nt−strand”), OLI16430 (“−4 nt+strand”), OLI16410 (“−18 nt−strand”), or OLI16409 (“−18 nt+strand”). FIG. 26B depicts the percentage of the precise 18 nucleotide deletion indels detected by sequencing the HBG PCR product 72 hours after electroporation with His-AsCpf1-sNLS-sNLS_HBG1-1 RNP alone or with OLI16410 (“−18 nt−strand”) or OLI16409 (“−18 nt+strand”). FIG. 26C depicts the percentage of the precise 18 nt deletion within all indels detected by sequencing the HBG PCR product 72 hours after electroporation with His-AsCpf1-sNLS-sNLS_HBG1-1 RNP alone or with OLI16410 (“−18 nt−strand”) or OLI16409 (“−18 nt+strand”).

[0120] FIGS. 27A-F depict schematics of the HBG1-1 target region and S. pyogenes Cas9 gRNA pairs used in combination. FIG. 27A shows the target region of HBG1-1 gRNA (comprising the RNA targeting domain set forth in SEQ ID NO: 1002, Table 15). The distal CCAAT box of HBG promoter (i.e., HBG1/2 c.−111 to −115) is indicated by a grey box. FIG. 27B shows the target region of HBG1-1, the distal CCAAT box of HBG, and the target region SpA gRNA (comprising the targeting domain of SEQ ID NO:941, Table 15). FIG. 27C shows the target region of HBG1-1, the distal CCAAT box of HBG, and the target region SpG gRNA (comprising the targeting domain of SEQ ID NO:359, Table 15). FIG. 27D shows the target region of HBG1-1, the distal CCAAT box of HBG, the target region of tSpA dead gRNA (“dgRNA”) (comprising the targeting domain of SEQ ID NO:326, Table 15), and the target region of Sp182 dgRNA (comprising the targeting domain of SEQ ID NO: 1028, Table 15). FIG. 27E shows the target region of HBG1-1, the distal CCAAT box of HBG, and tSpA dgRNA (comprising the targeting domain of SEQ ID NO:326, Table 15). FIG. 27F shows the target region of HBG1-1, the distal CCAAT box of HBG, and the target region of Sp182 dgRNA (comprising the targeting domain of SEQ ID NO:1028, Table 15).

[0121] FIGS. 28A-B depict HbF expression achieved by ex vivo editing of mPB CD34+ cells using HBG1-1-AsCpf1-RNP targeting the HBG promotor region. FIG. 28A shows results of editing at the HBG promoter region following delivery of 5 μM or 20 μM HBG1-1-AsCpf1-RNP (“HBG-1-1”) via Amaxa electroporation in mPB CD34+ cells. Delivery of 20 μM HBG1-1-AsCpf1-RNP via Amaxa electroporation results in up to ˜43% editing, and 21% HbF induction (above background levels). HbF levels are represented by black circles depicting expression levels of gamma-globin chains over total beta-like globin chains (gamma chains/[gamma chains+beta chain]) as measured by UPLC analysis on the erythroid progeny of mPB CD34+ cells. Grey bars depict the percentage of indels 72 hours post-electroporation detected by next generation sequencing (NGS) of the HBG PCR product. FIG. 28B shows results of editing at the HBG promoter region following delivery of 5 μM or 20 μM HBG1-1-AsCpf1-RNP (“HBG-1-1”) via MaxCyte electroporation in mPB CD34+ cells. Delivery of 20 μM HBG1-1-AsCpf1-RNP via MaxCyte electroporation results in up to ˜16% editing, and 7% HbF induction (above background levels). HbF levels are represented by black circles depicting expression levels of gamma-globin chains over total beta-like globin chains (gamma chains/[gamma chains+beta chain]) as measured by UPLC analysis on the erythroid progeny of mPB CD34+ cells. Grey bars depict the percentage of indels 72 hours post-electroporation detected by NGS of the HBG PCR product.

[0122] FIG. 29 depicts enhanced editing by HBG1-1-AsCpf1H800A-RNP at the HBG promotor region on the Maxcyte device by co-delivering various S. pyogenes Cas9 WT or Cas9D10A RNPs. “S.Py D10A” represents the Cas9 D10A nickase protein and “S.Py WT” represents the Cas9 WT protein. RNPs tested include SpA-D10A-RNP, SpG-D10A-RNP, tSpA-Cas9-RNP, Sp182-Cas9-RNP, and tSpA-Cas9-RNP+Sp182-Cas9-RNP (Table 14). Total editing at the HBG promoter region (grey bars) and the associated HbF protein induction (black circles) following delivery of HBG1-1-AsCpf1H800A-RNP alone (“HBG1-1”), or in combination with S. pyogenes Cas9 RNPs or pairs of RNP, is depicted. HbF levels are represented by black circles depicting expression levels of gamma-globin chains over total beta-like globin chains (gamma chains/[gamma chains+beta chain]) as measured by UPLC analysis on the erythroid progeny of mPB CD34+ cells. Grey bars depict the percentage of indels detected by NGS of the HBG PCR product.

[0123] FIG. 30 depicts viability of mPB CD34+ cells following MaxCyte delivery of HBG1-1-AsCpf1H800A-RNP alone (“HBG1-1”) or in combination with various S. pyogenes Cas9 WT or Cas9D10A RNPs. “S.Py D10A” represents the Cas9 D10A nickase protein and “S.Py WT” represents the Cas9 WT protein. RNPs tested include SpA-D10A-RNP, SpG-D10A-RNP, tSpA-Cas9-RNP, Sp182-Cas9-RNP, and tSpA-Cas9-RNP+Sp182-Cas9-RNP (Table 14). Viability was measured by DAPI staining and flow cytometry analysis at 24 h post electroporation.

[0124] FIGS. 31A-B depict the cleavage sites of HBG1-1-AsCpf1H800A-RNP and D10A-Cas9 RNP at the target region and the editing profile resulting from the co-delivery of the HBG1-1-AsCpf1H800A-RNP with a D10A RNP. FIG. 31A depicts the position of the HBG1-1-AsCpf1H800A-RNP cut sites on each strand of the target region (light grey arrows), as well as position of the nicking site targeted by the SpG-D10A-RNP and SpA-D10A-RNP (dark arrows) (Table 14). FIG. 31B depicts the editing profile resulting from the co-delivery of the HBG1-1-AsCpf1H800A-RNP (“HBG1-1 RNP”) with either SpG-D10A-RNP (“spG RNP”) or SpA-D10A-RNP (“spA RNP”) in mPB CD34+ at 72 h post-electroporation as detected by NGS analysis of the HBG PCR product (Table 14). The X-axis represents genomic position of the center of the indel relative to the HBG1-1-AsCpf1H800A-RNP positive strand cleavage site. The Y axis represents the length of the indel, where deletions are represented as negative values and insertions are represented as positive values. The total frequency of each indel is represented by the area of the symbol. Indels occurring at frequency equal or above 0.10% are depicted. The SpG and SpA target sites are indicated by dotted lines.

[0125] FIGS. 32A-B depict that the co-delivery of Sp182-Cas9-RNP with HBG1-1-AsCpf1H800A-RNP results in a boost in total indels and in distal CCAAT box disrupting indels with no substantial alteration of the indel profile, as detected by NGS analysis of the HBG PCR product at 72 h post-electroporation. FIG. 32A shows the indel profiles following editing with HBG1-1-AsCpf1H800A-RNP (“HBG1-1 RNP”) alone, or in combination with Sp182-Cas9-RNP (“sp182 RNP”). The X-axis represents genomic position of the center of the indel relative to the HBG1-1-AsCpf1H800A-RNP positive strand cleavage site. The Y axis represents the length of the indel, where deletions are represented as negative values and insertions are represented as positive values. The total frequency of each indel is represented by the area of the symbol. Indels occurring at frequency equal or above 0.10% are depicted. The Sp182 target site is indicated by a dotted line. FIG. 32B depicts the frequency of indels disrupting either none, 1 nt, 2 nt, 3 nt, 4 nt, or the entire 5 nt of the distal CCAAT box sequence.

[0126] FIG. 33 depicts that optimal doses of HBG1-1-AsCpf1H800A-RNP co-delivered with Sp182-Cas9-RNP result in an increase in total editing, and HbF production (Table 14). Delivery of HBG1-1-AsCpf1H800A-RNP (“HBG1-1”) as an RNP pair alongside Sp182-Cas9-RNP (“Sp182”), achieved >92% editing (grey bars) at the HBG promoter region with up to 34% HbF induction (above background) (black circles). No editing was observed when Sp182-Cas9-RNP was delivered alone at 12 μM. HbF levels are represented by black circles depicting expression levels of gamma-globin chains over total beta-like globin chains (gamma chains/[gamma chains+beta chain]) as measured by UPLC analysis on the erythroid progeny of mPB CD34+ cells. Grey bars depict the percentage of indels detected by NGS of the HBG PCR product.

[0127] FIG. 34 depicts the distribution of levels of gamma chain expression over total beta-like chains (gamma chains/[gamma chains+beta chain]) as measured by UPLC in the clonal erythroid progeny of single human mPB CD34+ cells edited at the HBG promotor region with HBG1-1-AsCpf1H800A-RNP in combination with Sp182-Cas9-RNP (Table 14). Each black circle represents the gamma-globin protein level detected in a clonal erythroid population derived from a single cell, isolated by FACS sorting at 48 h post electroporation.

[0128] FIGS. 35A-C depicts total editing, HbF production, viability, and colony forming potential after co-delivery of RNP containing modified HBG1-1 gRNA (SEQ ID NO:1041, Table 14) complexed to His-AsCpf1-sNLS-sNLS H800A (SEQ ID NO: 1032, Table 14) (“His-AsCpf1-sNLS-sNLS H800A_HBG1-1 RNP,” represented as “HBG1-1” in FIGS. 35A-C) with increasing concentrations of ssODN OLI16431 (SEQ ID NO: 1040, Table 11) (represented as “OLI16431” in FIGS. 35A-C) (Table 11). FIG. 35A depicts editing at the distal CAATT box (grey bars) and HbF induction (black circles) after co-delivery of 6 μM His-AsCpf1-sNLS-sNLS H800A_HBG1-1 RNP and increasing concentrations of ssODN OLI16431. HbF levels are represented by black circles depicting expression levels of gamma-globin chains over total beta-like globin chains (gamma chains/[gamma chains+beta chain]) as measured by UPLC analysis on the erythroid progeny of mPB CD34+ cells. Grey bars depict the percentage of indels detected by NGS of the HBG PCR product. FIG. 35B depicts viability of mPB CD34+ cells following delivery of His-AsCpf1-sNLS-sNLS H800A_HBG1-1 RNP alone or in combination with increasing doses of ssODN OLI16431. Viability was measured by DAPI exclusion at 72 hours post electroporation. FIG. 35C depicts the hematopoietic activity of the “HBG1-1” RNP and ssODN OLI16431 treated and donor matched untreated control CD34+ cells in colony forming cell (CFC) assays. CFCs shown are per 800 CD34+ cells plated. The number and subtype of colonies are indicated (GEMM: granulocyte-erythroid-monocyte-macrophage colony (black), GM: granulocyte-macrophage colony (dark grey), E: erythroid colony (light grey)).

[0129] FIGS. 36A-B depicts total editing, HbF production, and viability results using different concentrations of RNP containing unmodified HBG1-1 gRNA (SEQ ID NO: 1022, Table 14) complexed to His-AsCpf1-sNLS-sNLS H800A (SEQ ID NO: 1032, Table 14) (“His-AsCpf1-sNLS-sNLS H800A_HBG1-1 RNP,” represented as “HBG1-1” in FIGS. 36A-B) co-delivered with different concentrations of ssODN OLI16431 (SEQ ID NO: 1040, Table 11) (represented as “OLI16431” in FIGS. 36A-B) (Table 11). FIG. 36A depicts editing at the distal CAATT box (black bars (48 hours) and light grey bars (14 days of erythroid culture)) and HbF induction (black circles) after co-delivery of His-AsCpf1-sNLS-sNLS H800A_HBG1-1 RNP (“HBG1-1”) and ssODN OLI16431 at varying concentrations. HbF levels are represented by black circles depicting expression levels of gamma-globin chains over total beta-like globin chains (gamma chains/[gamma chains+beta chain]) as measured by UPLC analysis on the erythroid progeny of mPB CD34+ cells. Bars depict the percentage of indels detected by NGS of the HBG PCR product at 48 hours (black) and 14 day erythroid culture (light grey) timepoints. FIG. 36B depicts viability of mPB CD34+ cells following delivery of His-AsCpf1-sNLS-sNLS H800A_HBG1-1 RNP alone (“HBG1-1”), ssODN OLI16431 alone, or in combination with varying doses of HBG1-1 and OLI16431. Viability was measured by DAPI exclusion at 48 hours post electroporation and after 14 days in erythroid culture. Following the editing of mPB CD34+ cells, ex vivo differentiation into the erythroid linage was performed for 18 days (Giarratana 2011). At day 14 of culture, a subset of cells were isolated and viability (DAPI exclusion) and editing (NGS of the HBG PCR product) measurements were taken.

[0130] FIG. 37 depicts editing by RNP in mPB CD34+ cells. RNPs included gRNA complexed with Cpf1 protein as set forth in Table 21. Illumina sequencing was performed on isolated genomic DNA at 72 hours post electroporation.

[0131] FIGS. 38A-B depict editing in bulk CD34+ cell population (black bars), progenitor cells (light grey bars), and HSCs (dark grey bars), as determined by Illumina sequencing 48 hours post electroporation. FIG. 38A depicts RNP33 (Table 21) delivered alone or co-delivered with ssODN OLI16431 (SEQ ID NO:1040, Table 11). FIG. 38B depicts RNP33 (Table 21) delivered alone or co-delivered with Sp182 RNP (dead gRNA comprising SEQ ID NO: 1027 (Table 14) complexed with S. pyogenes Cas9 (SEQ ID NO: 1033)).

[0132] FIG. 39 depicts editing in bulk CD34+ cell population (black bars), progenitor cells (light grey bars), and HSCs (dark grey bars), as determined by Illumina sequencing 48 hours post electroporation. RNP34, RNP33, and RNP43 (Table 21) were delivered alone or in combination with Sp182 RNP (dead gRNA comprising SEQ ID NO: 1027 (Table 14) complexed with S. pyogenes Cas9 (SEQ ID NO:1033)) or ssODN OLI16431 (SEQ ID NO:1040, Table 11).

[0133] FIG. 40 depicts editing in CD34+ cells as determined by Illumina sequencing 72 hours post electroporation. RNP64, RNP63, and RNP45 (Table 21) were delivered at a stoichiometry (gRNA:Cpf1 complexation ratio) of either 2, or 4, where the gRNA is in a molar excess.

[0134] FIG. 41 depicts editing in CD34+ cells as determined by Illumina sequencing 72 hours post electroporation. RNP33, RNP64, RNP63, and RNP45 (Table 21) were delivered alone or in combination with Sp182 RNP (dead gRNA comprising SEQ ID NO: 1027 (Table 14) complexed with S. pyogenes Cas9 (SEQ ID NO:1033)) or ssODN OLI16431 (SEQ ID NO: 1040, Table 11).

[0135] FIG. 42 depicts editing in CD34+ cells as determined by Illumina sequencing. RNPs comprising Cpf1 (SEQ ID: 1094) complexed to gRNAs with various 5′ DNA extensions (Table 21), were delivered alone or in combination with 8 μM OLI16431 (SEQ ID NO: 1040, Table 11).

[0136] FIG. 43 depicts editing in CD34+ cells, as determined by Illumina sequencing. RNPs comprising gRNAs with matched 5′ ends (RNP49 vs RNP58 and RNP59 vs RNP60, Table 21) were delivered to CD34+ cells to assess the impact of 3′ modifications. In both comparisons, gRNAs with 3′ PS-OMe outperformed the unmodified 3′ version at 24 hours post electroporation.

[0137] FIGS. 44A-B depict editing in CD34+ cells as determined by Illumina sequencing 24 and 48 hours post electroporation. RNP58 (Table 21) was delivered to CD34+ cells at a stoichiometry (gRNA:Cpf1 complexation ratio) of either 2:1, 1:1 or 0.5:1 molar ratios. At all doses tested, editing was best when RNP was complexed at 2:1 ratio.

[0138] FIGS. 45A-B depict editing in CD34+ cells as determined by Illumina sequencing. FIGS. 45A and 45B depict RNPs comprising gRNAs with matched 5′ ends, but different 3′ modifications (Table 21) delivered to CD34+ cells to assess the impact of 3′ modifications or extensions.

[0139] FIGS. 46A-C depict editing in CD34+ cells and their erythroid progeny, and HbF levels in the erythroid progeny following delivery of RNPs targeting various cut sites within the HBG locus. FIG. 46A depicts RNPs comprising guide RNAs containing an unmodified 5′ and 1×PS-Ome at the 3′ end (Table 21). FIG. 46B depicts RNPs comprising guide RNAs containing 2PS+20 DNA extension at the 5′ and 1×PS-Ome at the 3′ end (Table 21). FIG. 46C depicts RNPs comprising guide RNAs containing a 25 DNA extension at the 5′ and 1×PS-Ome at the 3′ end (Table 21).

[0140] FIG. 47 depicts editing and HbF levels in erythroid progeny of CD34+ cells following delivery of RNP58 at 1 μM, 2 μM, and 4 μM.

[0141] FIG. 48 depicts editing in CD34+ cells following Maxcyte electroporation of RNPs. RNP58, RNP26, RNP27, and RNP28 comprising gRNA SEQ ID: 1051 complexed to different Cpf1 proteins (SEQ IDs: 1094, 1096, 1107, 1108) (Table 21) were delivered into CD34+ cells. Editing was determined by Illumina-sequencing 24 and 48 hours post electroporation.

[0142] FIG. 49 depicts editing in CD34+ cells following Maxcyte electroporation of RNPs. RNP58, RNP29, RNP30, and RNP31 comprising Cpf1 protein SEQ ID: 1094 complexed to guide RNAs with various 5′ extensions (Table 21) were delivered into CD34+ cells. Editing was determined by Illumina-seq 24 and 48 hours post electroporation. RNP30 was not tested (nt) at 1 μM due to limiting cell numbers.

[0143] FIG. 50 depicts editing in bulk CD34+ cell population (black bars), progenitor cells (dark grey bars), and HSCs (light grey bars), as determined by Illumina sequencing 48 hours post electroporation. RNP58, RNP27, and RNP26 (Table 21) were delivered to CD34+ cells at 2 μM or 4 μM.

[0144] FIG. 51 depicts editing in bulk CD34+ cell population (black bars), progenitor cells (dark grey bars), and HSCs (light grey bars), as determined by Illumina sequencing 48 hours post electroporation. RNP61, RNP62, and RNP34 (Table 21) (8 μM) were co-delivered to CD34+ cells with ssODN OLI16431 (SEQ ID NO:1040, Table 11) (8 μM).

[0145] FIG. 52 depicts editing in bulk CD34+ cell population (black bars), progenitor cells (dark grey bars), and HSCs (light grey bars), as determined by Illumina sequencing 48 hours post electroporation. RNP58 and RNP32 (Table 21) were delivered to CD34+ cells at 2 μM.

[0146] FIG. 53 depicts editing in bulk CD34+ cell population (black bars), progenitor cells (dark grey bars), and HSCs (light grey bars), as determined by Illumina sequencing 48 hours post electroporation. RNP58 and RNP1 (Table 21) were delivered to CD34+ cells at 2 μM, 4 μM, or 8 μM. The cells edited with RNP1 at 2 μM were not sorted (N.S), and thus editing data is not available.

[0147] FIG. 54 depicts the indels of engrafted mPB CD34+ cells from BM of “NBSGW” mice 8 weeks post infusion of electroporated cells. RNP34 and RNP33 (Table 21) (8 μM) were co-delivered to CD34+ cells with ssODN OLI16431 (SEQ ID NO:1040, Table 11) (6 μM).

[0148] FIGS. 55A-B depict the indels of engrafted mPB CD34+ cells and HbF expression by erythroid cells derived from chimeric BM of “NBSGW” mice 8 weeks post infusion of electroporated cells. RNP33 or RNP34 (Table 21) was co-delivered with Sp182 RNP (dead gRNA comprising SEQ ID NO: 1027 (Table 14) complexed with S. pyogenes Cas9 (SEQ ID NO: 1033)) (16 μM total RNP) to CD34+ cells. FIG. 55A depicts the indel frequency in unfractionated bone marrow or flow-sorted individual populations of CD15+, CD19+, GlyA+, and Lin−CD34+ cells in mock-transfected (no RNP added) or RNP transfected cells. Lin−CD34+ cells are defined as CD34+ cells that are negative for CD3, CD14, CD15, CD16, CD19, CD20, and CD56) from bone marrow (BM) of nonirradiated NOD,B6.SCID Il2rγ−/− Kit(W41/W41) (“NBSGW”) mice infused with mock (no RNP) or RNP transfected mPB CD34+ cells. Indels were determined for each cell population by Illumina sequencing. FIG. 55B depicts the HbF expression, calculated by UPLC as gamma/beta-like (%) from erythroid cell lysates following an 18-day erythroid differentiation culture from total chimeric BM.

[0149] FIGS. 56A-B depict the indels of engrafted mPB CD34+ cells and HbF expression by erythroid cells derived from chimeric BM of “NBSGW” mice 8 weeks post infusion of electroporated cells. RNP61 or RNP62 (Table 21) (8 μM) was co-delivered with ssODN OLI16431 (SEQ ID NO: 1040, Table 11) (8 μM) to CD34+ cells. FIG. 56A depicts the indels of unfractionated bone marrow or flow-sorted individual populations of CD15+, CD19+, GlyA+, and Lin−CD34+ cells in mock-transfected (no RNP added) or RNP transfected cells. Lin−CD34+ cells are defined as CD34+ cells that are negative for CD3, CD14, CD15, CD16, CD19, CD20, and CD56) from bone marrow (BM) of nonirradiated NBSGW mice infused with mock (no RNP) or RNP transfected mPB CD34+ cells. Indels were determined for each cell population by Illumina sequencing. FIG. 56B depicts the HbF expression, calculated by UPLC as gamma/beta-like (%) by erythroid cells following an 18-day erythroid differentiation culture from total chimeric BM.

[0150] FIG. 57 depicts human chimerism within bone marrow 8 weeks post infusion with mock (no RNP added) mPB CD34+ cells, or mPB CD34+ cells edited with RNP1 (4 or 8 μM) or RNP58 (2, 4 or 8 μM) (table 21). Human chimerism and lineage reconstitution (CD45+, CD14+, CD19+, glycophorin A (GlyA, CD235a+), lineage, and CD34+, and mouse CD45+ marker expression) in BM was determined by flow cytometry.

[0151] FIG. 58 depicts indels within unsorted bulk bone marrow 8 weeks post infusion with mock (no RNP added) mPB CD34+ cells, or mPB CD34+ cells edited with RNP1 (4 or 8 μM) or RNP58 (2, 4 or 8 μM) (table 21). Indels were determined by Illumina sequencing.

[0152] FIG. 59 depicts the indel frequency in unfractionated bone marrow or flow-sorted individual populations of CD15+, CD19+, GlyA+, and Lin−CD34+ cells in mock-transfected (no RNP added) or RNP transfected cells. Lin−CD34+ cells are defined as CD34+ cells that are negative for CD3, CD14, CD15, CD16, CD19, CD20, and CD56 from bone marrow (BM) of nonirradiated NOD,B6.SCID Il2rγ−/− Kit(W41/W41) (“NBSGW”) mice infused with mock (no RNP) or RNP transfected mPB CD34+ cells. Indels were determined for each cell population by Illumina sequencing.

[0153] FIG. 60 depicts HbF from GlyA+ fraction isolated from bone marrow at 8 weeks post infusion with mock (no RNP added) mPB CD34+ cells, or mPB CD34+ cells edited with RNP58 (2, 4 or 8 μM) (table 21).

[0154] FIG. 61 depicts colony forming potential of cells from bone marrow flushes taken 8 weeks post infusion of mock or edited human mobilized CD34+ cells. The number and subtype of colonies are indicated (GEMM: granulocyte-erythroid-monocyte-macrophage colony (black), GM: granulocyte-macrophage colony (dark grey), E: erythroid colony (light grey)).

[0155] FIG. 62 depicts the sequences of Cpf1 protein variants set forth in Table 20. Nuclear localization sequences are shown as bolded letters, six-histidine sequences are shown as underlined letters. Additional permutations of the identity and N-terminal/C-terminal positions of NLS sequences, e.g., appending two or more nNLS sequences or combinations of nNLS and sNLS sequences (or other NLS sequences) to either the N-terminal/C-terminal positions, as well as sequences with and without purification sequences, e.g., six-histidine sequences, are within the scope of the instantly disclosed subject matter.

[0156] FIGS. 63A-63E depict editing in the HBG distal CCAAT box region. FIG. 63A shows a schematic of the Cpf1 (RNP34, Table 21) and SpCas9 (Sp35 RNP) cleavage sites at the HBG distal CCAAT box region. Sp35 RNP comprises Sp35 gRNA (comprising the targeting domain of SEQ ID NO:339 (i.e., CUUGUCAAGGCUAUUGGUCA (RNA)); SEQ ID NO:917 (i.e., CTTGTCAAGGCTATTGGTCA (DNA)) complexed with S. pyogenes wildtype (Wt) Cas9 protein. The dark grey jagged line with arrows marks the expected 4 nucleotide 5′ overhang after cutting with RNP34. The grey dotted line marks the expected cut site of RNP34. This is the expected cut site for any RNP containing a gRNA comprising the gRNA targeting domain sequence UAAUUUCUACUCUUGUAGAUCCUUGUCAAGGCUAUUGGUC (SEQ ID NO: 1022). The Sp35 RNP expected cut site is indicated by the grey straight line with arrows.

[0157] FIG. 63B depicts the percentage of indels derived from NHEJ and MMEJ repair in the CD34+ cell population, progenitor cells, and HSCs. MMEJ indels are represented by the black striped bar and NHEJ indels are represented by the white bar. FIG. 63C and FIG. 63D depicts the G-gamma chain expression levels (percentage of G-gamma chain/[total beta-like chains]) in erythroid cells derived from mPB CD34+ cells electroporated with Sp35 RNP or RNP34+Sp182RNP; carrying indels ≤3 bp or >3 bp in length on their HBG allele encoding for G-gamma. Only clones with a monoalleleic 4.9 kb deletion (resulting in no g-gamma expression from one of the chromosome) were analyzed to ensure a single HBG allele was driving the g-gamma expression. Thus, the expression level shown represents the level of g-gamma expression by a single HBG gene, depending on the indel carried at the promoter, in cells that have the g-gamma gene on the other chromosome deleted. FIG. 63C shows the results grouped by indel ≤3 bp or >3 bp in length. FIG. 63D depicts the gamma chain expression levels (percentage of gamma chains/[total beta-like chains]) in erythroid cells derived from mPB CD34+ cells electroporated with Sp35 RNP or RNP34+Sp182 RNP producing indels ≤3 bp or >3 bp in length. The position of the deletion is indicated on the X axis. Xs indicate indels generated by Cas9 (Sp35 RNP) and circles indicate edits generated by Cpf1 (RNP34). FIG. 63E depicts the distribution of levels of gamma chain expression over total beta-like chains (gamma chains/[gamma chains+beta chain]) as measured by UPLC in the clonal erythroid progeny of single human mPB CD34+ cells edited at the HBG promotor region with spCas9 RNP “sp35” or Cpf1 RNP34 (HBG1-1-AsCpf1H800A-RNP) in combination with “booster element” Sp182-Cas9-RNP (Table 14). Each black circle represents the gamma-globin protein level detected in a clonal erythroid population derived from a single cell, isolated by FACS sorting at 48 hours post electroporation. The error bars show the median and interquartile range. “Negative” represents the “Mock” sample.

[0158] FIGS. 64A-64J depict editing via Cpf1 or SpCas9 enzyme cleavage. FIG. 64A depicts the percentage of NHEJ mediated indels at the distal CCAAT box resulting from RNP58 (Cpf1) (Table 21) or Sp35 RNP (SpCas9) editing. Indel size is indicated by the x-axis. FIG. 64B depicts the percentage of >3 bp NHEJ mediated indels, >3 bp MMEJ mediated indels, and ≤3 bp indels at the distal CCAAT box resulting from editing by Cpf1 or SpCas9 RNP. For Sp35 RNP Cas9 indels in FIG. 64B (left pie chart): NHEJ>3 bp=21.42%; ≤3 bp=48.84%; MMEJ>3 bp=29.74%. For RNP58 Cpf1 indels in FIG. 64B (right pie chart): NHEJ>3 bp=64.86%; ≤3 bp=11.11%; MMEJ>3 bp=24.02%. FIG. 64C shows the wild type (wt) allele and top 18 indels, together with their average percentages in indel for all the samples, and their corresponding final sequences after the edit. Dashes represent deleted bases and the vertical line is the cut site (see also FIG. 77A). The long dark grey line above the wt allele marks the DNA sequence of the gRNA targeting domain of the gRNA of RNP58 (i.e., CCUUGUCAAGGCUAUUGGUCA (SEQ ID NO: 1254)), and the shorter black line marks the distal CCAAT box (appearing reverse complemented here). Base distances with respect to TSS are marked by arrows. The grey boxes represent regions of homology which indicate MMEJ repair. FIG. 64D shows the wild type (wt) allele and top 18 indels, together with their average percentages in indel for all the samples, and their corresponding final sequences after the edit. Dashes represent deleted bases and the vertical line is the cut site (see also FIG. 77A). The long dark grey line above the wt allele marks the DNA sequence of the gRNA targeting domain of the gRNA of Sp35 RNP (i.e., CUUGUCAAGGCUAUUGGUCA SEQ ID NO:339), and the short black line marks the distal CCAAT box (appearing reverse complemented here). Base distances with respect to TSS are marked by arrows. The grey boxes represent regions of homology which indicate MMEJ repair. FIG. 64E shows the percentage of bases deleted along the target region in samples edited with RNP58 or Sp35 RNP. The black line represents RNP58 editing and the dashed line represents Sp35 RNP editing. The target region DNA sequence is shown on the x axis. The grey line marks the DNA sequence of the gRNA targeting domain of the gRNA of Sp35 RNP (i.e., CUUGUCAAGGCUAUUGGUCA SEQ ID NO:339), and the short black line marks the distal CCAAT box (appearing reverse complemented here). FIG. 64F shows the normalized profiles (each with a maximum value of 1) for the detected deletions at each base on the target region in samples edited with RNP58 or Sp35 RNP. The black line represents RNP58 editing and the dashed line represents Sp35 RNP editing. The target region DNA sequence is shown on the x axis. The grey line marks the DNA sequence of the gRNA targeting domain of the gRNA of Sp35 RNP (i.e., CUUGUCAAGGCUAUUGGUCA SEQ ID NO:339), and the short black line marks the distal CCAAT box (appearing reverse complemented here). FIG. 64G shows the percentage of detected indels as a function of the deletion size (negative values on the x axis) or insertion (positive values in the x axis). The black line represents RNP58 editing and the dashed line represents Sp35 RNP editing. FIG. 64H shows the percentage of detected indels at each position in the target region. Sp35 RNP is represented by the dashed line. RNP58 is represented by the solid line. The target region DNA sequence is shown on the x axis. The gray line marks the DNA sequence of the gRNA targeting domain of the gRNA of Sp35 RNP (i.e., CUUGUCAAGGCUAUUGGUCA SEQ ID NO:339), and the short black line marks the distal CCAAT box (appearing reverse complemented here). FIG. 64I shows the frequency correlation for shared indels detected at ≥0.1% in either Sp35 RNP or RNP58 edited cells. FIG. 64J frequency correlation for all indels detected in at least one of the samples. Indels not detected in Sp35 RNP-edited cells are shown to the left of the vertical line at 1E-5. Indels not detected in RNP58-edited cells are shown to the bottom of the horizontal line at 1E-5. Triangles represent deletions ≤3 bp and circles represent deletions >3 bp.

[0159] FIGS. 65A-65O depict RNP32 editing resulting in long term engraftment, indel maintenance, and high HbF induction in vivo. FIG. 65A depicts the percentage of >3 bp NHEJ mediated indels, >3 bp MMEJ mediated indels, and ≤3 bp indels at the distal CCAAT box resulting from editing by RNP32 24 hours following electroporation: NHEJ>3 bp=66.10%; ≤3 bp=12.60%; MMEJ>3 bp=27.10%. FIG. 65B depicts the percentage of >3 bp NHEJ mediated indels, >3 bp MMEJ mediated indels, and <3 bp indels at the distal CCAAT box resulting from editing by RNP32 48 hours following electroporation: NHEJ>3 bp=65.30%; ≤3 bp=12.70%; MMEJ>3 bp=27.80%. FIG. 65C depicts the percentage of >3 bp NHEJ mediated indels, >3 bp MMEJ mediated indels, and <3 bp indels at the distal CCAAT box resulting from editing by RNP32 72 hours following electroporation: NHEJ>3 bp=64.70%; ≤3 bp=11.90%; MMEJ>3 bp=29.20%. FIG. 65D depicts the percentage of indels at the distal CCAAT box mediated via NHEJ repair resulting from editing by RNP32 24, 48, and 72 hours following electroporation and preinfusion. FIG. 65E depicts the percentage of indels at the distal CCAAT box mediated via NHEJ repair resulting from editing by RNP32 24 hours following electroporation and preinfusion. FIG. 65F depicts the percentage of indels at the distal CCAAT box mediated via NHEJ repair resulting from editing by RNP32 48 hours following electroporation and preinfusion. FIG. 65G depicts the percentage of indels at the distal CCAAT box mediated via NHEJ repair resulting from editing by RNP32 72 hours following electroporation and preinfusion. FIG. 65H depicts the percentage of all indels at the distal CCAAT box resulting from editing by RNP32 24, 48, and 72 hours following electroporation and preinfusion. FIG. 65I depicts the percentage of all indels at the distal CCAAT box from editing by RNP32 24 hours following electroporation and preinfusion. FIG. 65J depicts the percentage of all indels at the distal CCAAT box resulting from editing by RNP32 48 hours following electroporation and preinfusion. FIG. 65K depicts the percentage of all indels at the distal CCAAT box resulting from editing by RNP32 72 hours following electroporation and preinfusion. FIG. 65L depicts the percentage of indels in pre-infused RNP32 edited mPB CD34+ cells (“Preinfusion”) and long-term repopulating CD34+ cells from NBSGW mice following infusion of RNP32 edited mPB CD34+ cells and 16 weeks engraftment (“BM”). FIG. 65M depicts human chimerism within bone marrow 16 weeks post infusion with mock (no RNP added) mPB CD34+ cells or mPB CD34+ cells edited with RNP32 (Table 21). Human chimerism and lineage reconstitution (CD19+, CD15+, CD235A+), lineage, and CD34+, and mouse CD45+ marker expression) in BM was determined by flow cytometry. FIG. 65N depicts the percentage of F positive cells in mock (no RNP added) and CD235a+ (GlyA+) erythroid cells, derived from RNP32 edited CD34+ cells. FIG. 65O depicts the percentage of HbF shown by expression levels of gamma-globin chains over total beta-like globin chains (gamma chains/[gamma chains+beta chain]) as measured by UPLC analysis of CD235a+ (GlyA+) erythroid cells.

[0160] FIGS. 66A-66B depict high polyclonality in NBSGW mice infused with RNP32 edited CD34+ cells. FIG. 66A shows high polyclonality over a 20 week period (8, 12, 16, and 20 weeks post-infusion) in the blood of mice (Mouse A, Mouse B, Mouse C, Mouse D) infused with RNP32 edited CD34+ cells. “0” represents data from pre-infused RNP32 edited mPB CD34+ cells. FIG. 66B shows high polyclonality in the bone marrow (BM) of NBSGW mice infused with RNP32 edited CD34+ cells at 20 weeks post-engraftment. In FIGS. 66A and 66B, each shade of grey within the graphical depiction represents a different indel signature, with the most frequent indel type located near the x-axis and the least frequent indel type located near the top of the plot.

[0161] FIG. 67 shows a schematic of the β-globin locus. “CD34+ cells^{a}” means CD34+ hematopoietic stem and progenitor cells, “HS” means hypersensitive site, “LCR” means locus control region, “TSS” means transcriptional start site.

[0162] FIG. 68A shows viability of normal and SCD CD34+ cells at Days 1 to 3 post electroporation with 6 μM of RNP32 compiled from two independent experiments. Individual data points and mean for each treatment group are shown. N=4 for normal donors; N=5 for sickle donors (CEL238-001 [normal CD34+ cells] and CEL211-001 [SCD CD34+ cells] were each tested twice). FIG. 68B shows CD34+ cell viability post-electroporation with RNP32. ^{a} indicates only applicable to RNP32-electroporated cells. ^{b} indicates insufficient number of cells available and thus viability was not assessed.

[0163] FIG. 69A shows indel levels of normal and SCD CD34+ cells at Days 1 to 3 post electroporation with 6 μM of RNP32 compiled from two independent experiments. Individual data points and mean for each treatment group are shown. N=4 for normal donors; N=5 for sickle donors. (CEL238-001 [normal CD34+ cells] and CEL211-001 [SCD CD34+ cells] were each tested twice. Indel=insertions and/or deletions. FIG. 69B shows comparable and efficient editing in RNP32 edited CD34+ cells from normal donors and patients with SCD. The percentage of indels was evaluated in unedited and RNP32 edited CD34+ cells from normal donors (n=3) and from unedited and RNP32 edited CD34+ cells from patients with SCD (n=4). Unedited cells did not undergo electroporation. FIG. 69C shows indel levels of CD34+ cells post-electroporation with RNP32. ND=Not Determined (Insufficient sample to run sequencing analysis).

[0164] FIGS. 70A-70D depict PCR Primers and mixes for digital droplet polymerase chain reaction (ddPCR). FIG. 70A depicts a schematic representation of ddPCR primers and probe positions relative to RNP32 cut sites. FIG. 70B shows the primers and probe sequences for 4.9 kb fragment deletion assessment. FIG. 70C shows the Master Mix 1 and 2 compositions for ddPCR Assay 6 and 9. FIG. 70D shows the Master Mix 3 composition.

[0165] FIG. 71A shows the frequency of 4.9 kb fragment deletion of normal and SCD CD34+ cells at Day 1 post electroporation with 6 μM of RNP32. Data are from 1 study (SCD014). Each dot represents 1 sample. Untreated cells did not undergo electroporation. FIG. 71B shows the frequency of 4.9 kb deletion in CD34+ cells post-electroporation with RNP32. NA=data not available as digital droplet polymerase chain reaction assays failed. Untreated cells did not undergo electroporation.

[0166] FIG. 72A shows fold expansion of erythroid progeny of CD34+ cells. Normal and SCD CD34+ cells, either untreated or electroporated with 6 μM of RNP32, were placed in erythroid-inducing conditions for 18 days. Data were compiled from 2 independent experiments. Each dot represents 1 sample. FIG. 72B shows enucleation frequency of erythroid progeny of CD34+ cells. Normal and SCD CD34+ cells, either untreated or electroporated with 6 μM of RNP32, were placed in erythroid-inducing conditions for 18 days. Data were compiled from 2 independent experiments. Each dot represents 1 sample.

[0167] FIG. 73A shows an assessment of HbF induction in erythroid progeny in two experiments. Normal and SCD CD34+ cells, either untreated or electroporated with 6 μM of RNP32, were placed in erythroid-inducing conditions for 18 days. The relative abundance of globin chains in erythroid lysate was analyzed by RP-UPLC and HbF levels were calculated as HbF (%)=(Aγ+Gγ)/(Aγ+G+β) (%). FIG. 73B shows the frequency of HbF+ RBCs evaluated by flow cytometry in one independent experiment. For FIG. 73A and FIG. 73B, each dot represents 1 sample. Paired T test was performed to determine whether the differences between RNP32-treated samples and untreated samples were statistically significant. * p<0.05, ** p<0.01, **** p<0.0001. RP-UPLC=reverse phase ultra-performance liquid chromatography. Untreated cells did not undergo electroporation. FIG. 73C shows comparable and robust ex vivo HbF expression in RNP32 edited CD34+ cells from normal donors and patients with SCD. The percentage of HbF is shown by expression levels of gamma-globin chains over total beta-like globin chains (gamma chains/[gamma chains+beta chain]) in unedited and RNP32 edited CD34+ cells from normal donors (n=3) and in unedited and RNP32 edited CD34+ cells from patients with SCD (n=4). Unedited cells did not undergo electroporation.

[0168] FIG. 74 shows RNP32 edited CD34+ derived red blood cells (RBCs) from SCD patients have reduced sickling versus unedited RBCs from SCD patients when exposed to sodium metabisulfite and examined under a microscope. The percentage of sickled RBCs is shown for unedited SCD-derived RBCs and RNP32 edited SCD-derived RBCs. The mean HbF percentage is also shown for unedited SCD-derived RBCs and RNP32 edited SCD-derived RBCs.

[0169] FIG. 75A shows a graphic representation of the measured loss of deformability, the point-of-sickling of SCD RBCs, as a result of oxygen-depletion in time, followed by subsequent gain of deformability of RBC's during reoxygenation, as is visualized on the Oxygenscan. EImax represents RBC deformability at normoxia and EImin represents deformability upon deoxygenation. The point of sickling (PoS) reflects pO2 at which sickling begins and a >5% decrease in EI is observed during deoxygenation. EI=elongation index. FIGS. 75B-75E shows the assessment of RBC deformability. Cultured RBCs from three batches of untreated normal CD34+ cells (FIG. 75B) and four batches of untreated or RNP32-edited SCD CD34+ cells (FIG. 75C) were analyzed on the Lorrca ektacytometer to measure deformability under shear stress, expressed as elongation index, when subjected to decreasing level of 02. In FIG. 75C, RBCs cultured from CD34+ cells that did not undergo electroporation with RNP32 (untreated) are represented by the black line (bottom line in all plots until at least 25 mmHg) and RBCs cultured from RNP32-edited SCD CD34+ cells are represented by a dark gray line (top line in all plots until at least 25 mmHg). The point of sickling, representing the relative oxygen pressure when the SCD RBCs started to sickle during deoxygenation was plotted for each SCD RBC sample (FIG. 75D). The minimum elongation index of each SCD RBC sample, approximating the flexibility of RBC when deoxygenated is shown in (FIG. 75E). Each line connects the RBCs cultured from untreated and RNP32 edited cells from the same donor in the same experiment. CEL211-001 was tested twice in two independent experiments. A paired T test was performed to determine whether the differences between RBCs cultured from RNP32-treated samples and untreated samples were statistically significant. ** p<0.01, *** p<0.001.

[0170] FIG. 76A shows a rheology assessment of cultured RBCs. Untreated CD34+ cells and untreated or RNP32-electroporated SCD CD34+ cells were placed in erythroid-inducing conditions for 18 days to generate erythroid cells. Rheological behavior of cultured RBCs under varying concentrations of oxygen were evaluated using a microfluidic platform. The percentage velocity drop was calculated based on the differences between velocity at specified oxygen concentration and at atmospheric levels of oxygen (21%). Data shown are mean±standard deviation. N=5: untreated SCD samples, N=5: RNP32 treated SCD samples, N=4: untreated normal samples. Paired T test was used to compare the means between RBCs cultured from untreated and corresponding RNP32-edited SCD samples. *p<0.05, ***p<0.001, ****p<0.0001. FIG. 76B shows a summary of percentage velocity drop by varying oxygen concentration. ^{b} indicates samples clogged during assessment and experiments were aborted. Only data collected prior to the blockage formation are reported. Data are not plotted in FIG. 76A. FIG. 76C shows that RBCs cultured from RNP32-edited CD34+ cells from SCD patients have improved rheological properties, closer to RBCs from normal donors, compared to RBCs cultured from unedited CD34+ cells from SCD patients when placed in microfluidic channels that mimic blood flow in capillaries, in a range of oxygen levels. The percentage of normalized velocity was evaluated for RBCs cultured from unedited normal donor-derived CD34+ cells (diamonds), RBCs cultured from unedited SCD-donor derived CD34+ cells (triangles), and RBCs cultured from RNP32-edited SCD-derived CD34+ cells (circles) at varying percentages of oxygen. Typical oxygen levels observed in the venous circulation are between ˜4% to 6% oxygen. FIG. 76D shows the correlation between HbF induction and rheology behavior. The level of HbF expressed by SCD samples (x-axis) was plotted against the corresponding percentage velocity drop (y-axis) at 0%, 2%, 4% and 6% oxygen concentration. Simple linear regression analysis was performed and the coefficient of determination is shown in each panel. FIG. 76E shows HbF levels correlate with velocity for RBCs cultured from unedited SCD-derived CD34+ cells (triangles) and RBCs from RNP32-edited SCD-derived CD34+ cells (circles) when placed in microfluidic channels mimicking blood flow in capillaries at an oxygen level of 4%. The percentage of HbF is shown by expression levels of gamma-globin chains over total beta-like globin chains (gamma chains/[gamma chains+beta chain]).

[0171] FIG. 77A shows a schematic of the distal CCAAT box region with 0-based hg38 coordinates chr11:5,249,949-5,249,987 (+) in HBG1 and chr11:5,254,873-5,254,911 (+) in HBG2. The black line marks the DNA sequence of the gRNA targeting domain of the gRNA of RNP32 (i.e., CCUUGUCAAGGCUAUUGGUCA (SEQ ID NO: 1254)). The black box marks the distal CCAAT box. The dark grey jagged line with arrows marks the expected 4 nucleotide 5′ overhang after cutting with RNP32. The grey dotted line marks the expected cut site of RNP32. The base before the cut site is marked with a black arrow at position −118 bases with respect to the TSS. The distances for the bases at the boundaries to the TSS are marked by black arrows at the end of the sequences (TSS: −93 and −130).

[0172] FIG. 77B shows the oligonucleotides used for sequencing the indel profiles generated by RNP32. FIG. 77C shows the amplicon used for analysis of RNP32 editing. FIG. 77D shows an example of an indel_id used to characterize the indel profile of RNP32. The Indel_id is a string identifying the indel, shown as indel_start_position+_+indel_length+_+ID. Where ID is NA for deletions and for insertions is the sequence inserted.

[0173] FIG. 78 depicts the percentage of >3 bp NHEJ mediated indels, >3 bp MMEJ mediated indels, and ≤3 bp indels at the distal CCAAT box resulting from editing by RNP32: NHEJ>3 bp=65.9%; ≤3 bp=8.6%; MMEJ>3 bp=25.5%.

[0174] FIG. 79 shows the wild type (wt) allele and top 20 indels, together with their average percentages in indel for all the samples, and their corresponding final sequences after the edit. Dashes represent deleted bases and the vertical line is the cut site (see also FIG. 77A). The black line marks the DNA sequence of the gRNA targeting domain of the gRNA of RNP32 (i.e., CCUUGUCAAGGCUAUUGGUCA (SEQ ID NO: 1254)), and shorter black line marks the distal CCAAT box (appearing reverse complemented here). Base distances with respect to TSS are marked by arrows.

[0175] FIG. 80 shows the percentage of detected deletions as a function of the distance between the deletion center and the cut site, represented by the vertical dashed grey line taken as the middle of the 5′ overhang. The highest peak is at position −6 bp relative to the cut site (TSS: −113) and towards the TSS (see also FIG. 77A). Profiles are shown as black for normal donor samples (Normal, N=4), light grey for sickle cell donor samples (SCD, N=5) and dark grey for an additional set of normal donor samples (Normal=5, SCD1) samples. The second set of Normal samples are from study SCD1 and were mobilized with G-CSF and plerixafor and generated using the large-scale process. The black line marks the DNA sequence of the gRNA targeting domain of the gRNA of RNP32 (i.e., CCUUGUCAAGGCUAUUGGUCA (SEQ ID NO: 1254)), and short black line marks the distal CCAAT box (appearing reverse complemented here).

[0176] FIG. 81 shows the percentage of detected indels as a function of the deletion size (negative values on the x axis) or insertion (positive values in the x axis). The vertical line separates insertions and deletions. The highest peak is the deletion of size 18 corresponding to the indel 159_−18_NA. Profiles are shown as black for normal donor samples (Normal, N=4), light grey for sickle cell donor samples (SCD, N=5) and dark grey for an additional set of normal donor samples (Normal=5, SCD1) samples. The second set of Normal samples are from study SCD1 and were mobilized with G-CSF and plerixafor and generated using the large-scale process.

[0177] FIG. 82 shows the average percentages for indel lengths between 50 and −50. Positive values indicate insertions. Negative values indicate deletions.

[0178] FIG. 83 shows the percentage of bases deleted along the target region in samples edited with RNP32. Profiles are shown as black for normal donor samples (Normal, N=4) and dark grey for an additional set of normal donor samples (Normal=5, SCD1) samples. The second set of Normal samples are from study SCD1 and were mobilized with G-CSF and plerixafor and generated using the large-scale process. The target region DNA sequence is shown on the x axis. The black line marks the DNA sequence of the gRNA targeting domain of the gRNA of RNP32 (i.e., CCUUGUCAAGGCUAUUGGUCA (SEQ ID NO: 1254)), and short black line marks the distal CCAAT box (appearing reverse complemented here). Vertical dashed grey line represents the cut site, taken as the middle of the 5′ overhang (see also FIG. 77A).

[0179] FIG. 84 shows the normalized profiles (each with a maximum value of 1) for the detected deletions at each base on the target region in samples edited with RNP32. Profiles are shown as black for normal donor samples (Normal, N=4), light grey for sickle cell donor samples (SCD, N=5) and dark grey for an additional set of normal donor samples (Normal=5, SCD1) samples. The second set of Normal samples are from study SCD1 and were mobilized with G-CSF and plerixafor and generated using the large-scale process. The target region sequence is shown in the x axis. The black line marks the DNA sequence of the gRNA targeting domain of the gRNA of RNP32 (i.e., CCUUGUCAAGGCUAUUGGUCA (SEQ ID NO: 1254)), and short black line marks the distal CCAAT box (appearing reverse complemented here). Vertical dashed grey line represents the cut site, taken as the middle of the 5′ overhang (see also FIG. 77A).

[0180] FIG. 85 shows the number of indels detected across multiple samples. Shown are the counts for the number of indels as a function of the number of samples in which the indel was detected.

[0181] FIG. 86 shows the indel reproducibility across all 14 samples as a function of their average percentage in indels. Shown are the average percentages in indel (y-axis) grouped by the number of samples in which the indel was detected (x-axis). Grey horizontal line at 0.22% marks the lowest percentage in indel of the top 55 indels.

[0182] FIGS. 87A and 87B show on-target indel levels of CD34+ cells based on RNP32 concentration at electroporation. Total on-target editing indel level was determined via Illumina sequencing at day 1 (FIG. 87A) and day 2 (FIG. 87B) after CD34+ cells were electroporated with RNP32 at the concentrations indicated. Data were compiled from eight independent experiments. A total of five RNP batches and four lots of normal donor CD34+ cells were tested across eleven concentrations of RNP32 ranging from 0.125 μM to 8 μM. Each dot represents an individual electroporation. Indel=insertions and/or deletions.

[0183] FIG. 88 shows a summary of cell viability at day 1 electroporation with RNP32. Data marked with an * indicates RNP32 found to be poorly complexed based on differential scanning fluorimetry and thus data were excluded.

[0184] FIG. 89 shows a summary of on-target indel levels at day 1 post-electroporation with RNP32. Data marked with an * indicates RNP32 found to be poorly complexed based on differential scanning fluorimetry and thus data were excluded.

[0185] FIG. 90 shows a summary of on-target indels at day 2 post-electroporation. Data marked with an * indicates RNP32 found to be poorly complexed based on differential scanning fluorimetry and thus data were excluded.

[0186] FIGS. 91A and 91B shows the frequency of 4.9 kb fragment deletion in edited CD34+ cells at day 1 and day 2 post-electroporation. Frequency of 4.9 kb fragment deletion between two RNP32 cut sites in CD34+ cells was assessed by ddPCR assays at Day 1 and Day 2 post electroporation with RNP at the concentration indicated (FIG. 91A). The 4.9 kb deletion to indel ratio was calculated by dividing levels of deletion with levels of indels for each sample (FIG. 91B). Data were compiled from three independent experiments. A total of two RNP batches and two lots of normal donor CD34+ cells were tested across eight concentrations of RNP32 ranging from 0.125 μM to 8 μM. Each dot represents an individual electroporation. Indel=insertions and/or deletions.

[0187] FIG. 92 shows the summary of 4.9 kb fragment deletion frequency at day 1 and day 2 post-electroporation with RNP32.

[0188] FIGS. 93A and 93B show on-target indel levels of subpopulations of hematopoietic stem and progenitor cells. CD34+ cells were sorted 2 days post-electroporation into subpopulations of CMP, MPP, and LT-HSC based on surface immunophenotype. FIG. 93A shows on-target indel levels determined via Illumina sequencing. The ratio of on-target indel levels within the phenotypic LT-HSC population to the total CD34+ cells is depicted in FIG. 93B. A ratio of 1 (dotted line) illustrates that the LT-HSCs have the same on-target indel levels as total CD34+ cells. CMP=common myeloid progenitors; Indel=insertions and/or deletions; LT-HSC=long-term hematopoietic stem cells; MPP=multipotent progenitors.

[0189] FIG. 94 shows a summary of on-target indel levels in total CD34+ cells and sorted subpopulations at day 2 post-electroporation. CMP=common myeloid progenitors; Indel=insertions and/or deletions; LT-HSC=long-term hematopoietic stem cells; MPP=multipotent progenitors.

[0190] FIGS. 95A and 95B show the frequency of 4.9 kb fragment deletion in total CD34+ cells and sorted hematopoietic stem and progenitor cell subpopulations. CD34+ cells were sorted 2 days post electroporation into subpopulations of CMP, MPP, and LT HSC based on surface immunophenotype. FIG. 95A shows the frequency of 4.9 kb deletion determined via ddPCR. The 4.9 kb deletion to indel ratio was calculated by dividing levels of deletion with levels of indels for each sample (FIG. 95B). A lower ratio depicts a lower propensity of 4.9 kb deletions to occur within a population. Multiple comparison was performed using Friedman test. *p=0.01, ****p<0.0001. CMP=common myeloid progenitors; Indel=insertions and/or deletions; LT HSC=long-term hematopoietic stem cells; MPP=multipotent progenitors.

[0191] FIG. 96 shows a summary of 4.9 kb fragment deletion frequency in total CD34+ cells and sorted subpopulations at day 2 post-electroporation with RNP32. CD34+=cluster of differentiation 34; CMP=common myeloid progenitors; Indel=insertions and/or deletions; LT-HSC=long-term hematopoietic stem cells; MPP=multipotent progenitors; RNP=ribonucleoprotein.

### DETAILED DESCRIPTION

### Definitions and Abbreviations

[0192] Unless otherwise specified, each of the following terms has the meaning associated with it in this section.

[0193] The indefinite articles “a” and “an” refer to at least one of the associated noun, and are used interchangeably with the terms “at least one” and “one or more.” For example, “a module” means at least one module, or one or more modules.

[0194] The conjunctions “or” and “and/or” are used interchangeably as non-exclusive disjunctions.

[0195] “Domain” is used to describe a segment of a protein or nucleic acid. Unless otherwise indicated, a domain is not required to have any specific functional property.

[0196] The term “exogenous trans-acting factor” refers to any peptide or nucleotide component of a genome editing system that both (a) interacts with an RNA-guided nuclease or gRNA by means of a modification, such as a peptide or nucleotide insertion or fusion, to the RNA-guided nuclease or gRNA, and (b) interacts with a target DNA to alter a helical structure thereof. Peptide or nucleotide insertions or fusions may include, without limitation, direct covalent linkages between the RNA-guided nuclease or gRNA and the exogenous trans-acting factor, and/or non-covalent linkages mediated by the insertion or fusion of RNA/protein interaction domains such as MS2 loops and protein/protein interaction domains such as a PDZ, Lim or SH1, 2 or 3 domains. Other specific RNA and amino acid interaction motifs will be familiar to those of skill in the art. Trans-acting factors may include, generally, transcriptional activators.

[0197] The term “booster element” refers to an element which, when co-delivered with a ribonucleoprotein (RNP) complex comprising a gRNA complexed to an RNA-guided nuclease (“gRNA-nuclease-RNP”), increases editing of a target nucleic acid compared with editing of the target nucleic acid without the booster element. In certain embodiments, co-delivery may be sequential or simultaneous. In certain embodiments, a booster element may be an RNP complex comprised of a dead guide RNA complexed with a WT Cas9 protein, a Cas9 nickase protein (e.g., Cas9 D10A protein), or an enzymatically inactive Cas9 (eiCas9) protein. In certain embodiments, a booster element may be an RNP complex comprised of a guide RNA complexed with a Cas9 nickase protein (e.g., Cas9 D10A protein) or an enzymatically inactive Cas9 (eiCas9) protein. In certain embodiments, a booster element may be a single- or double stranded donor template DNA. In certain embodiments, one or more booster elements may be codelivered with a gRNA-nuclease-RNP to increase editing of a target nucleic acid. In certain embodiments, a booster element may be co-delivered with an RNP comprising a gRNA complexed to a Cpf1 molecule (“gRNA-Cpf1-RNP”) to increase editing of a target nucleic acid.

[0198] “Productive indel” refers to an indel (deletion and/or insertion) that results in HbF expression. In certain embodiments, a productive indel may induce HbF expression. In certain embodiments, a productive indel may result in an increased level of HbF expression.

[0199] An “indel” is an insertion and/or deletion in a nucleic acid sequence. An indel may be the product of the repair of a DNA double strand break, such as a double strand break formed by a genome editing system of the present disclosure. An indel is most commonly formed when a break is repaired by an “error prone” repair pathway such as the NHEJ pathway described below.

[0200] “Gene conversion” refers to the alteration of a DNA sequence by incorporation of an endogenous homologous sequence (e.g. a homologous sequence within a gene array). “Gene correction” refers to the alteration of a DNA sequence by incorporation of an exogenous homologous sequence, such as an exogenous single- or double stranded donor template DNA. Gene conversion and gene correction are products of the repair of DNA double-strand breaks by HDR pathways such as those described below.

[0201] Indels, gene conversion, gene correction, and other genome editing outcomes are typically assessed by sequencing (most commonly by “next-gen” or “sequencing-by-synthesis” methods, though Sanger sequencing may still be used) and are quantified by the relative frequency of numerical changes (e.g., +1, +2 or more bases) at a site of interest among all sequencing reads. DNA samples for sequencing may be prepared by a variety of methods known in the art, and may involve the amplification of sites of interest by polymerase chain reaction (PCR), the capture of DNA ends generated by double strand breaks, as in the GUIDEseq process described in Tsai 2016 (incorporated by reference herein) or by other means well known in the art. Genome editing outcomes may also be assessed by in situ hybridization methods such as the FiberComb™ system commercialized by Genomic Vision (Bagneux, France), and by any other suitable methods known in the art.

[0202] “Alt-HDR,” “alternative homology-directed repair,” or “alternative HDR” are used interchangeably to refer to the process of repairing DNA damage using a homologous nucleic acid (e.g., an endogenous homologous sequence, e.g., a sister chromatid, or an exogenous nucleic acid, e.g., a template nucleic acid). Alt-HDR is distinct from canonical HDR in that the process utilizes different pathways from canonical HDR, and can be inhibited by the canonical HDR mediators, RAD51 and BRCA2. Alt-HDR is also distinguished by the involvement of a single-stranded or nicked homologous nucleic acid template, whereas canonical HDR generally involves a double-stranded homologous template.

[0203] “Canonical HDR,” “canonical homology-directed repair” or “cHDR” refer to the process of repairing DNA damage using a homologous nucleic acid (e.g., an endogenous homologous sequence, e.g., a sister chromatid, or an exogenous nucleic acid, e.g., a template nucleic acid). Canonical HDR typically acts when there has been significant resection at the double strand break, forming at least one single stranded portion of DNA. In a normal cell, cHDR typically involves a series of steps such as recognition of the break, stabilization of the break, resection, stabilization of single stranded DNA, formation of a DNA crossover intermediate, resolution of the crossover intermediate, and ligation. The process requires RAD51 and BRCA2, and the homologous nucleic acid is typically double-stranded.

[0204] Unless indicated otherwise, the term “HDR” as used herein encompasses both canonical HDR and alt-HDR.

[0205] “Non-homologous end joining” or “NHEJ” refers to ligation mediated repair and/or non-template mediated repair including canonical NHEJ (cNHEJ) and alternative NHEJ (altNHEJ), which in turn includes microhomology-mediated end joining (MMEJ), single-strand annealing (SSA), and synthesis-dependent microhomology-mediated end joining (SD-MMEJ).

[0206] “Replacement” or “replaced,” when used with reference to a modification of a molecule (e.g. a nucleic acid or protein), does not require a process limitation but merely indicates that the replacement entity is present.

[0207] “Subject” means a human, mouse, or non-human primate. A human subject can be any age (e.g., an infant, child, young adult, or adult), and may suffer from a disease, or may be in need of alteration of a gene.

[0208] “Treat,” “treating,” and “treatment” mean the treatment of a disease in a subject (e.g., a human subject), including one or more of inhibiting the disease, i.e., arresting or preventing its development or progression; relieving the disease, i.e., causing regression of the disease state; relieving one or more symptoms of the disease; and curing the disease.

[0209] “Prevent,” “preventing,” and “prevention” refer to the prevention of a disease in a subject, including (a) avoiding or precluding the disease; (b) affecting the predisposition toward the disease; or (c) preventing or delaying the onset of at least one symptom of the disease.

[0210] A “kit” refers to any collection of two or more components that together constitute a functional unit that can be employed for a specific purpose. By way of illustration (and not limitation), one kit according to this disclosure can include a guide RNA complexed or able to complex with an RNA-guided nuclease, and accompanied by (e.g. suspended in, or suspendable in) a pharmaceutically acceptable carrier. In certain embodiments, the kit may include a booster element. The kit can be used to introduce the complex into, for example, a cell or a subject, for the purpose of causing a desired genomic alteration in such cell or subject. The components of a kit can be packaged together, or they may be separately packaged. Kits according to this disclosure also optionally include directions for use (DFU) that describe the use of the kit e.g., according to a method of this disclosure. The DFU can be physically packaged with the kit, or it can be made available to a user of the kit, for instance by electronic means.

[0211] The terms “polynucleotide”, “nucleotide sequence”, “nucleic acid”, “nucleic acid molecule”, “nucleic acid sequence”, and “oligonucleotide” refer to a series of nucleotide bases (also called “nucleotides”) in DNA and RNA, and mean any chain of two or more nucleotides. The polynucleotides, nucleotide sequences, nucleic acids etc. can be chimeric mixtures or derivatives or modified versions thereof, single-stranded or double-stranded. They can be modified at the base moiety, sugar moiety, or phosphate backbone, for example, to improve stability of the molecule, its hybridization parameters, etc. A nucleotide sequence typically carries genetic information, including, but not limited to, the information used by cellular machinery to make proteins and enzymes. These terms include double- or single-stranded genomic DNA, RNA, any synthetic and genetically manipulated polynucleotide, and both sense and antisense polynucleotides. These terms also include nucleic acids containing modified bases.

[0212] Conventional IUPAC notation is used in nucleotide sequences presented herein, as shown in Table 1, below (see also Cornish-Bowden A, Nucleic Acids Res. 1985 May 10; 13(9):3021-30, incorporated by reference herein). It should be noted, however, that “T” denotes “Thymine or Uracil” in those instances where a sequence may be encoded by either DNA or RNA, for example in gRNA targeting domains.

TABLE 1
IUPAC nucleic acid notation

| Character | Base |
|---|---|
| A | Adenine |
| T | Thymine or Uracil |
| G | Guanine |
| C | Cytosine |
| U | Uracil |
| K | G or T/U |
| M | A or C |
| R | A or G |
| Y | C or T/U |
| S | C or G |
| W | A or T/U |
| B | C, G or T/U |
| V | A, C or G |
| H | A, C or T/U |
| D | A, G or T/U |
| N | A, C, G or T/U |

[0213] The terms “protein,” “peptide” and “polypeptide” are used interchangeably to refer to a sequential chain of amino acids linked together via peptide bonds. The terms include individual proteins, groups or complexes of proteins that associate together, as well as fragments or portions, variants, derivatives and analogs of such proteins. Peptide sequences are presented herein using conventional notation, beginning with the amino or N-terminus on the left, and proceeding to the carboxyl or C-terminus on the right. Standard one-letter or three-letter abbreviations can be used.

[0214] The notation “CCAAT box target region” and the like refer to a sequence that is 5′ of the transcription start site (TSS) of the HBG1 and/or HBG2 gene. CCAAT boxes are highly conserved motifs within the promoter region of a-like and β-like globin genes. The regions within or near the CCAAT box play important roles in globin gene regulation. For example, the γ-globin distal CCAAT box is associated with hereditary persistence of fetal hemoglobin. A number of transcription factors have been reported to bind to the duplicated CCAAT box region of the γ-globin promoter, e.g., NF-Y, COUP-TFII (NF-E3), CDP, GATA1/NF-E1 and DRED (Martyn 2017). While not wishing to be bound by theory, it is believed that the binding sites of the transcriptional activator NF-Y overlaps with transcriptional repressors at the γ-globin promoter. HPFH mutations present within the distal γ-globin promoter region, e.g., within or near the CCAAT box, may alter the competitive binding of those factors and thus contribute to the increased γ-globin expression and elevated levels of HbF. Genomic locations provided herein for HBG1 and HBG2 are based on the coordinates provided in NCBI Reference Sequence NC_000011, “Homo sapiens chromosome 11, GRCh38.p12 Primary Assembly,” (Version NC_000011.10). The distal CCAAT box of HBG1 and HBG2 is positioned at HBG1 and HBG2 c.−111 to −115 (Genomic location is Hg38 Chr11:5,249,968 to Chr11:5,249,972 and Hg38 Chr11:5,254,892 to Chr11:5,254,896, respectively). The HBG1 c.−111 to −115 region is exemplified in SEQ ID NO:902 (HBG1) at positions 2823-2827, and the HBG2 c.−111 to −115 region is exemplified in SEQ ID NO:903 (HBG2) at positions 2747-2751. In certain embodiments, the “CCAAT box target region” denotes the region that is at or near the distal CCAAT box and includes the nucleotides of the distal CCAAT box and 25 nucleotides upstream (5′) and 25 nucleotides downstream (3′) of the distal CCAAT box (i.e., HBG1/2 c.−86 to −140) (Genomic location is Hg38 Chr11:5249943 to Hg38 Chr11:5249997 and Hg38 Chr11:5254867 to Hg38 Chr11:5254921, respectively). The HBG1 c.−86 to −140 region is exemplified in SEQ ID NO:902 (HBG1) at positions 2798-2852, and the HBG2 c.−86 to −140 region is exemplified in SEQ ID NO:903 (HBG2) at positions 2723-2776. In other embodiments, the “CCAAT box target region” denotes the region that is at or near the distal CCAAT box and includes the nucleotides of the distal CCAAT box and 5 nucleotides upstream (5′) and 5 nucleotides downstream (3′) of the distal CCAAT box (i.e., HBG1/2 c.−106 to −120 (Genomic location is Hg38 Chr11:5249963 to Hg38 Chr11:5249977 (HGB1 and Hg38 Chr11:5254887 to Hg38 Chr11:5254901, respectively)). The HBG1 c.−106 to −120 region is exemplified in SEQ ID NO:902 (HBG1) at positions 2818-2832, and the HBG2 c.−106 to −120 region is exemplified in SEQ ID NO:903 (HBG2) at positions 2742-2756. The term “CCAAT box target site alteration” and the like refer to alterations (e.g., deletions, insertions, mutations) of one or more nucleotides of the CCAAT box target region. Examples of exemplary CCAAT box target region alterations include, without limitation, the 1 nt deletion, 4 nt deletion, 11 nt deletion, 13 nt deletion, and 18 nt deletion, and −117 G>A alteration. As used herein, the terms “CCAAT box” and “CAAT box” can be used interchangeably.

[0215] The notations “c.−114 to −102 region,” “c.−102 to −114 region,” “−102:−114,” “13 nt target region” and the like refer to a sequence that is 5′ of the transcription start site (TSS) of the HBG1 and/or HBG2 gene at the genomic location Hg38 Chr11:5,249,959 to Hg38 Chr11:5,249,971 and Hg38 Chr11:5,254,883 to Hg38 Chr11:5,254,895, respectively. The HBG1 c.−102 to −114 region is exemplified in SEQ ID NO:902 (HBG1) at positions 2824-2836 and the HBG2 c.−102 to −114 region is exemplified in SEQ ID NO:903 (HBG2) at positions 2748-2760. The term “13 nt deletion” and the like refer to deletions of the 13 nt target region.

[0216] The notations “c.−121 to −104 region,” “c.−104 to −121 region,” “−104:−121,” “18 nt target region,” and the like refer to a sequence that is 5′ of the transcription start site (TSS) of the HBG1 and/or HBG2 gene at the genomic location Hg38 Chr11:5,249,961 to Hg38 Chr11:5,249,978 and Hg38 Chr11:5,254,885 to Hg38 Chr11: 5,254,902, respectively. The HBG1 c.−104 to −121 region is exemplified in SEQ ID NO:902 (HBG1) at positions 2817-2834, and the HBG2 c.−104 to −121 region is exemplified in SEQ ID NO:903 (HBG2) at positions 2741-2758. The term “18 nt deletion” and the like refer to deletions of the 18 nt target region.

[0217] The notations “c.−105 to −115 region,” “c.−115 to −105 region,” “−105:−115,” “11 nt target region,” and the like refer to a sequence that is 5′ of the transcription start site (TSS) of the HBG1 and/or HBG2 gene at the genomic location Hg38 Chr11:5,249,962 to Hg38 Chr11:5,249,972 and Hg38 Chr11:5,254,886 to Hg38 Chr11:5,254,896, respectively. The HBG1 c.−105 to −115 region is exemplified in SEQ ID NO:902 (HBG1) at positions 2823-2833, and the HBG2 c.−105 to −115 region is exemplified in SEQ ID NO:903 (HBG2) at positions 2747-2757. The term “11 nt deletion” and the like refer to deletions of the 11 nt target region.

[0218] The notations “c.−115 to −112 region,” “c.−112 to −115 region,” “−112:−115,” “4 nt target region,” and the like refer to a sequence that is 5′ of the transcription start site (TSS) of the HBG1 and/or HBG2 gene at the genomic location Hg38 Chr11:5,249,969 to Hg38 Chr11:5,249,972 and Hg38 Chr11:5,254,893 to Hg38 Chr11:5,254,896, respectively. The HBG1 c.−112 to −115 region is exemplified in SEQ ID NO:902 at positions 2823-2826, and the HBG2 c.−112 to −115 region is exemplified in SEQ ID NO:903 (HBG2) at positions 2747-2750. The term “4 nt deletion” and the like refer to deletions of the 4 nt target region.

[0219] The notations “c.−116 region,” “HBG-116,” “1 nt target region,” and the like refer to a sequence that is 5′ of the transcription start site (TSS) of the HBG1 and/or HBG2 gene at the genomic location Hg38 Chr11:5,249,973 and Hg38 Chr11:5,254,897, respectively. The HBG1 c.−116 region is exemplified in SEQ ID NO:902 at position 2822, and the HBG2 c.−116 region is exemplified in SEQ ID NO:903 (HBG2) at position 2746. The term “1 nt deletion” and the like refer to deletions of the 1 nt target region.

[0220] The notations “c.−117 G>A region,” “HBG-117 G>A,” “−117 G>A target region” and the like refer to a sequence that is 5′ of the transcription start site (TSS) of the HBG1 and/or HBG2 gene at the genomic location Hg38 Chr11:5,249,974 to Hg38 Chr11:5,249,974 and Hg38 Chr11:5,254,898 to Hg38 Chr11:5,254,898, respectively. The HBG1 c.−117 G>A region is exemplified by a substitution from guanine (G) to adenine (A) in SEQ ID NO:902 at position 2821, and the HBG2 c.−117 G>A region is exemplified by a substitution from G to A in SEQ ID NO:903 (HBG2) at position 2745. The term “−117 G>A alteration” and the like refer to a substitution from G to A at the −117G>A target region.

[0221] The term “proximal HBG1/2 promoter target sequence” denotes the region within 50, 100, 200, 300, 400, or 500 bp of a proximal HBG1/2 promoter sequence including the 13 nt target region. Alterations by genome editing systems according to this disclosure facilitate (e.g. cause, promote or tend to increase the likelihood of) upregulation of HbF production in erythroid progeny.

[0222] The term “GATA1 binding motif in BCL11Ae” refers to the sequence that is the GATA1 binding motif in the erythroid specific enhancer of BCL11A (BCL11Ae) that is in the +58 DNase I hypersensitive site (DHS) region of intron 2 of the BCL11A gene. The genomic coordinates for the GATA1 binding motif in BCL11Ae are chr2: 60,495,265 to 60,495,270. The +58 DHS site comprises a 115 base pair (bp) sequence as set forth in SEQ ID NO:968. The +58 DHS site sequence, including −500 bp upstream and −200 bp downstream is set forth in SEQ ID NO:969.

[0223] Where ranges are provided herein, endpoints are included. Furthermore, it is to be understood that unless otherwise indicated or otherwise evident from the context and/or the understanding of one of ordinary skill in the art, values that are expressed as ranges can assume any specific value within the stated ranges in different embodiments of the invention, to the tenth of the unit of the lower limit of the range, unless the context clearly dictates otherwise. It is also to be understood that unless otherwise indicated or otherwise evident from the context and/or the understanding of one of ordinary skill in the art, values expressed as ranges can assume any subrange within the given range, wherein the endpoints of the subrange are expressed to the same degree of accuracy as the tenth of the unit of the lower limit of the range.

### Overview

[0224] The various embodiments of this disclosure generally relate to genome editing systems configured to introduce alterations (e.g., a deletion or insertion, or other mutation) into chromosomal DNA that enhance transcription of the HBG1 and/or HBG2 genes, which encode the Aγ and Gγ subunits of hemoglobin, respectively. In certain embodiments, increased expression of one or more γ-globin genes (e.g., HBG1, HBG2) using the methods provided herein results in preferential formation of HbF over HbA and/or increased HbF levels as a percentage of total hemoglobin. In certain embodiments, the disclosure generally relates to the use of RNP complexes comprising a gRNA complexed to a Cpf1 molecule. In certain embodiments, the gRNA may be unmodified or modified, the Cpf1 molecule may be a wild-type Cpf1 protein or a modified Cpf1 protein. In certain embodiments, the gRNA may comprise a sequence set forth in Table 13, Table 18, or Table 19. In certain embodiments, a modified Cpf1 may be encoded by a sequence set forth in SEQ ID NOs:1000, 1001, 1008-1018, 1032, 1035-39, 1094-1097, 1107-09 (Cpf1 polypeptide sequences) or SEQ ID NOs:1019-1021, 1110-17 (Cpf1 polynucleotide sequences). In certain embodiments, the RNP complex may comprise an RNP complex set forth in Table 21. For example, the RNP complex may include a gRNA comprising the sequence set forth in SEQ ID NO: 1051 and a modified Cpf1 protein encoded by the sequence set forth in SEQ ID NO: 1097 (RNP32, Table 21).

[0225] It has previously been shown that patients with the condition Hereditary Persistence of Fetal Hemoglobin (HPFH) contain mutations in an γ-globin regulatory element that results in fetal γ-globin expression throughout life, rather than being repressed around the time of birth (Martyn 2017). This results in elevated fetal hemoglobin (HbF) expression. HPFH mutations may be deletional or non-deletional (e.g., point mutations). Subjects with HPFH exhibit lifelong expression of HbF, i.e., they do not undergo or undergo only partial globin switching, with no symptoms of anemia.

[0226] HbF expression can be induced through point mutations in an γ-globin regulatory element that is associated with a naturally occurring HPFH variant, including, for example, HBG1 c.−114 C>T; c.−117 G>A; c.−158 C>T; c.−167 C>T; c.−170 G>A; c.−175 T>G; c.−175 T>C; c.−195 C>G; c.−196 C>T; c.−197 C>T; c.−198 T>C; c.−201 C>T; c.−202 C>T; c.−211 C>T, c.−251 T>C; or c.−499 T>A; or HBG2 c.−109 G>T; c.−110 A>C; c.−114 C>A; c.−114 C>T; c.−114 C>G; c.−157 C>T; c.−158 C>T; c.−167 C>T; c.−167 C>A; c.−175 T>C; c.−197 C>T; c.−200+C; c.−202 C>G; c.−211 C>T; c.−228 T>C; c.−255 C>G; c.−309 A>G; c.−369 C>G; or c.−567 T>G.

[0227] Naturally occurring mutations at the distal CCAAT box motif found within the promoter of the HBG1 and/or HBG2 genes (i.e., HBG1/2 c.−111 to −115) have also been shown to result in continued γ-globin expression and the HPFH condition. It is thought that alteration (mutation or deletion) of the CCAAT box may disrupt the binding of one or more transcriptional repressors, resulting in continued expression of the γ-globin gene and elevated HbF expression (Martyn 2017). For example, a naturally occurring 13 base pair del c.−114 to −102 (“13 nt deletion”) has been shown to be associated with elevated levels of HbF (Martyn 2017). The distal CCAAT box likely overlaps with the binding motifs within and surrounding the CCAAT box of negative regulatory transcription factors that are expressed in adulthood and repress HBG (Martyn 2017).

[0228] A gene editing strategy disclosed herein is to increase HbF expression by disrupting one or more nucleotides in the distal CCAAT box and/or surrounding the distal CCAAT box. In certain embodiments, the “CCAAT box target region” may be the region that is at or near the distal CCAAT box and includes the nucleotides of the distal CCAAT box and 25 nucleotides upstream (5′) and 25 nucleotides downstream (3′) of the distal CCAAT box (i.e., HBG1/2 c.−86 to −140). In other embodiments, the “CCAAT box target region” may be the region that is at or near the distal CCAAT box and includes the nucleotides of the distal CCAAT box and 5 nucleotides upstream (5′) and 5 nucleotides downstream (3′) of the distal CCAAT box (i.e., HBG1/2 c.−106 to −120). Unique, non-naturally occurring alterations of the CCAAT box target region are disclosed herein that induce HBG expression including, without limitation, HBG del c.−104 to −121 (“18 nt deletion”), HBG del c.−105 to −115 (“11 nt deletion”), HBG del c.−112 to −115 (“4 nt deletion”), and HBG del c.−116 (“1 nt deletion”). In certain embodiments, genome editing systems disclosed herein may be used to introduce alterations into the CCAAT box target region of HBG1 and/or HBG2. In certain embodiments, the genome editing systems may include one or more of a DNA donor template that encodes an alteration (such as a deletion, insertion, or mutation) in the CCAAT box target region. In certain embodiments, the alterations may be non-naturally occurring alterations or naturally occurring alterations. In certain embodiments, the donor templates may encode the 1 nt deletion, 4 nt deletion, 11 nt deletion, 13 nt deletion, 18 nt deletion, or c.−117 G>A alteration. In certain embodiments, the genome editing systems may include an RNA guided nuclease including a Cas9, modified Cas 9, a Cpf1, or modified Cpf1. In certain embodiments, the genome editing systems may include an RNP comprising a gRNA and a Cpf1 molecule. In certain embodiments, a gRNA may be unmodified or modified, the Cpf1 molecule may be a wild-type Cpf1 protein or a modified Cpf1 protein, or a combination thereof. In certain embodiments, the gRNA may comprise a sequence set forth in Table 13, Table 18, or Table 19. In certain embodiments, a modified Cpf1 may be encoded by a sequence set forth in SEQ ID NOs:1000, 1001, 1008-1018, 1032, 1035-39, 1094-1097, 1107-09 (Cpf1 polypeptide sequences) or SEQ ID NOs:1019-1021, 1110-17 (Cpf1 polynucleotide sequences). In certain embodiments, the RNP complex may comprise an RNP complex set forth in Table 21. For example, the RNP complex may include a gRNA comprising the sequence set forth in SEQ ID NO:1051 and a modified Cpf1 protein encoded by the sequence set forth in SEQ ID NO: 1097 (RNP32, Table 21).

[0229] HbF expression can also be induced through targeted disruption of the erythroid cell specific expression of a transcriptional repressor, BCL11A, which encodes a repressor that silences HBG1 and HBG2 (Canvers 2015). Another gene editing strategy disclosed herein is to increase HbF expression by targeting disruption the of the erythroid specific enhancer of BCL11A (BCL11Ae) (also discussed in commonly-assigned International Patent Publication No. WO 2015/148860 by Friedland et al. (“Friedland”), published Oct. 1, 2015, which is incorporated by reference in its entirety herein). In certain embodiments, the region of BCL11Ae targeted for disruption may be the GATA1 binding motif in BCL11Ae. In certain embodiments, genome editing systems disclosed herein may be used to introduce alterations into the GATA1 binding motif in BCL11Ae, the CCAAT box target region, the 13 nt target region of HBG1 and/or HBG2, or a combination thereof.

[0230] The genome editing systems of this disclosure can include an RNA-guided nuclease such as Cas9 or Cpf1 and one or more gRNAs having a targeting domain that is complementary to a sequence in or near the target region, and optionally one or more of a DNA donor template that encodes a specific mutation (such as a deletion or insertion) in or near the target region, and/or an agent that enhances the efficiency with which such mutations are generated including, without limitation, a random oligonucleotide, a small molecule agonist or antagonist of a gene product involved in DNA repair or a DNA damage response, or a peptide agent.

[0231] A variety of approaches to the introduction of mutations into the CCAAT box target region, 13 nt target region, proximal HBG1/2 promoter target sequence, and/or the GATA1 binding motif in BCL11Ae may be employed in the embodiments of the present disclosure. In one approach, a single alteration, such as a double-strand break, is made within the CCAAT box target region, 13 nt target region, proximal HBG1/2 promoter target sequence, and/or the GATA1 binding motif in BCL11Ae, and is repaired in a way that disrupts the function of the region, for example by the formation of an indel or by the incorporation of a donor template sequence that encodes the deletion of the region. In a second approach, two or more alterations are made on either side of the region, resulting in the deletion of the intervening sequence, including the CCAAT box target region, 13 nt target region and/or the GATA1 binding motif in BCL11Ae.

[0232] The treatment of hemoglobinopathies by gene therapy and/or genome editing is complicated by the fact that the cells that are phenotypically affected by the disease, erythrocytes or RBCs, are enucleated, and do not contain genetic material encoding either the aberrant hemoglobin protein (Hb) subunits nor the Aγ or Gγ subunits targeted in the exemplary genome editing approaches described above. This complication is addressed, in certain embodiments of this disclosure, by the alteration of cells that are competent to differentiate into, or otherwise give rise to, erythrocytes. Cells within the erythroid lineage that are altered according to various embodiments of this disclosure include, without limitation, hematopoietic stem and progenitor cells (HSCs), erythroblasts (including basophilic, polychromatic and/or orthochromatic erythroblasts), proerythroblasts, polychromatic erythrocytes or reticulocytes, embryonic stem (ES) cells, and/or induced pluripotent stem (iPSC) cells. These cells may be altered in situ (e.g. within a tissue of a subject) or ex vivo. Implementations of genome editing systems for in situ and ex vivo alteration of cells is described under the heading “Implementation of genome editing systems: delivery, formulations, and routes of administration” below.

[0233] In certain embodiments, alterations that result in induction of Aγ and/or Gγ expression are obtained through the use of a genome editing system comprising an RNA-guided nuclease and at least one gRNA having a targeting domain complementary to a sequence within the CCAAT box target region of HBG1 and/or HBG2 or proximate thereto (e.g., within 10, 20, 30, 40, or 50, 100, 200, 300, 400 or 500 bases of the CCAAT box target region). As is discussed in greater detail below, the RNA-guided nuclease and gRNA form a complex that is capable of associating with and altering the CCAAT box target region or a region proximate thereto. Examples of suitable gRNAs and gRNA targeting domains directed to the CCAAT box target region of HBG1 and/or HBG2 or proximate thereto for use in the embodiments disclosed herein include, without limitation, those set forth in SEQ ID NOs:251-901, 940-942, 970, 971, 996, 997, 1002, and 1004.

[0234] In certain embodiments, alterations that result in induction of Aγ and/or Gγ expression are obtained through the use of a genome editing system comprising an RNA-guided nuclease and at least one gRNA having a targeting domain complementary to a sequence within the 13 nt target region of HBG1 and/or HBG2 or proximate thereto (e.g., within 10, 20, 30, 40, or 50, 100, 200, 300, 400 or 500 bases of the 13 nt target region). As is discussed in greater detail below, the RNA-guided nuclease and gRNA form a complex that is capable of associating with and altering the 13 nt target region or a region proximate thereto. Examples of suitable gRNAs and gRNA targeting domains directed to the 13 nt target region of HBG1 and/or HBG2 or proximate thereto for use in the embodiments disclosed herein include, without limitation, those set forth in SEQ ID NOs:251-901, 940-942, 970, 971, 996, 997, 1002, and 1004.

[0235] In certain embodiments, alterations that result in induction of HbF expression are obtained through the use of a genome editing system comprising an RNA-guided nuclease and at least one gRNA having a targeting domain complementary to a sequence within the GATA1 binding motif in BCL11Ae or proximate thereto (e.g., within 10, 20, 30, 40, or 50, 100, 200, 300, 400 or 500 bases of the GATA1 binding motif in BCL11Ae). In certain embodiments, the RNA-guided nuclease and gRNA form a complex that is capable of associating with and altering the GATA1 binding motif in BCL11Ae. Examples of suitable targeting domains directed to the GATA1 binding motif in BCL11Ae for use in the embodiments disclosed herein include, without limitation, those set forth in SEQ ID NOs:952-955.

[0236] The genome editing system can be implemented in a variety of ways, as is discussed below in detail. As an example, a genome editing system of this disclosure can be implemented as a ribonucleoprotein complex or a plurality of complexes in which multiple gRNAs are used. This ribonucleoprotein complex can be introduced into a target cell using art-known methods, including electroporation, as described in commonly-assigned International Patent Publication No. WO 2016/182959 by Jennifer Gori (“Gori”), published Nov. 17, 2016, which is incorporated by reference in its entirety herein.

[0237] The ribonucleoprotein complexes within these compositions are introduced into target cells by art-known methods, including without limitation electroporation (e.g. using the Nucleofection™ technology commercialized by Lonza, Basel, Switzerland or similar technologies commercialized by, for example, Maxcyte Inc. Gaithersburg, Md.) and lipofection (e.g. using Lipofectamine™ reagent commercialized by Thermo Fisher Scientific, Waltham Mass.). Alternatively, or additionally, ribonucleoprotein complexes are formed within the target cells themselves following introduction of nucleic acids encoding the RNA-guided nuclease and/or gRNA. These and other delivery modalities are described in general terms below and in Gori.

[0238] Cells that have been altered ex vivo according to this disclosure can be manipulated (e.g. expanded, passaged, frozen, differentiated, de-differentiated, transduced with a transgene, etc.) prior to their delivery to a subject. The cells are, variously, delivered to a subject from which they are obtained (in an “autologous” transplant), or to a recipient who is immunologically distinct from a donor of the cells (in an “allogeneic” transplant).

[0239] In some cases, an autologous transplant includes the steps of obtaining, from the subject, a plurality of cells, either circulating in peripheral blood, or within the marrow or other tissue (e.g. spleen, skin, etc.), and manipulating those cells to enrich for cells in the erythroid lineage (e.g. by induction to generate iPSCs, purification of cells expressing certain cell surface markers such as CD34, CD90, CD49f and/or not expressing surface markers characteristic of non-erythroid lineages such as CD10, CD14, CD38, etc.). The cells are, optionally or additionally, expanded, transduced with a transgene, exposed to a cytokine or other peptide or small molecule agent, and/or frozen/thawed prior to transduction with a genome editing system targeting the CCAAT box target region, the 13 nt target region, proximal HBG1/2 promoter target sequence, and/or the GATA1 binding motif in BCL11Ae. The genome editing system can be implemented or delivered to the cells in any suitable format, including as a ribonucleoprotein complex, as separated protein and nucleic acid components, and/or as nucleic acids encoding the components of the genome editing system.

[0240] In certain embodiments, CD34+ hematopoietic stem and progenitor cells (HSPCs) that have been edited using the genome editing methods disclosed herein may be used for the treatment of a hemoglobinopathy in a subject in need thereof. In certain embodiments, the hemoglobinopathy may be severe sickle cell disease (SCD) or thalassemia, such as 0-thalassemia, S-thalassemia, or β/δ− thalassemia. In certain embodiments, an exemplary protocol for treatment of a hemoglobinopathy may include harvesting CD34+ HSPCs from a subject in need thereof, ex vivo editing of the autologous CD34+ HSPCs using the genome editing methods disclosed herein, followed by reinfusion of the edited autologous CD34+ HSPCs into the subject. In certain embodiments, treatment with edited autologous CD34+ HSPCs may result in increased HbF induction.

[0241] Prior to harvesting CD34+ HSPCs, in certain embodiments, a subject may discontinue treatment with hydroxyurea, if applicable, and receive blood transfusions to maintain sufficient hemoglobin (Hb) levels. In certain embodiments, a subject may be administered intravenous plerixafor (e.g., 0.24 mg/kg) to mobilize CD34+ HSPCs from bone marrow into peripheral blood. In certain embodiments, a subject may undergo one or more leukapheresis cycles (e.g., approximately one month between cycles, with one cycle defined as two plerixafor-mobilized leukapheresis collections performed on consecutive days). In certain embodiments, the number of leukapheresis cycles performed for a subject may be the number required to achieve a dose of edited autologous CD34+ HSPCs (e.g., ≥2×10⁶ cells/kg, ≥3×10⁶ cells/kg, ≥4×10⁶ cells/kg, ≥5×10⁶ cells/kg, 2×10⁶ cells/kg to 3×10⁶ cells/kg, 3×10⁶ cells/kg to 4×10⁶ cells/kg, 4×10⁶ cells/kg to 5×10⁶ cells/kg) to be reinfused back into the subject, along with a dose of unedited autologous CD34+ HSPCs/kg for backup storage (e.g., ≥1.5×10⁶ cells/kg). In certain embodiments, the CD34+ HSPCs harvested from the subject may be edited using any of the genome editing methods discussed herein. In certain embodiments, any one or more of the gRNAs and one or more of the RNA-guided nucleases disclosed herein may be used in the genome editing methods.

[0242] In certain embodiments, the treatment may include an autologous stem cell transplant. In certain embodiments, a subject may undergo myeloablative conditioning with busulfan conditioning (e.g., dose-adjusted based on first-dose pharmacokinetic analysis, with a test dose of 1 mg/kg). In certain embodiments, conditioning may occur for four consecutive days. In certain embodiments, following a three-day busulfan washout period, edited autologous CD34+ HSPCs (e.g., ≥2×10⁶ cells/kg, ≥3×10⁶ cells/kg, ≥4×10⁶ cells/kg, ≥5×10⁶ cells/kg, 2×10⁶ cells/kg to 3×10⁶ cells/kg, 3×10⁶ cells/kg to 4×10⁶ cells/kg, 4×10⁶ cells/kg to 5×10⁶ cells/kg) may be reinfused into the subject (e.g., into peripheral blood). In certain embodiments, the edited autologous CD34+ HSPCs may be manufactured and cryopreserved for a particular subject. In certain embodiments, a subject may attain neutrophil engraftment following a sequential myeloablative conditioning regimen and infusion of edited autologous CD34+ cells. Neutrophil engraftment may be defined as three consecutive measurements of ANC≥0.5×10⁹/L.

[0243] However it is implemented, a genome editing system may include, or may be co-delivered with, one or more factors that improve the viability of the cells during and after editing, including without limitation an aryl hydrocarbon receptor antagonist such as StemRegenin-1 (SRI), UM171, LGC0006, alpha-napthoflavone, and CH-223191, and/or an innate immune response antagonist such as cyclosporin A, dexamethasone, reservatrol, a MyD88 inhibitory peptide, an RNAi agent targeting Myd88, a B18R recombinant protein, a glucocorticoid, OxPAPC, a TLR antagonist, rapamycin, BX795, and a RLR shRNA. These and other factors that improve the viability of the cells during and after editing are described in Gori, under the heading “I. Optimization of Stem Cells” from page 36 through page 61, which is incorporated by reference herein.

[0244] The cells, following delivery of the genome editing system, are optionally manipulated e.g. to enrich for HSCs and/or cells in the erythroid lineage and/or for edited cells, to expand them, freeze/thaw, or otherwise prepare the cells for return to the subject. The edited cells are then returned to the subject, for instance in the circulatory system by means of intravenous delivery or delivery or into a solid tissue such as bone marrow.

[0245] Functionally, alteration of the CCAAT box target region, 13 nt target region, proximal HBG1/2 promoter target sequence, and/or the GATA1 binding motif in BCL11Ae using the compositions, methods and genome editing systems of this disclosure results in significant induction, among hemoglobin-expressing cells, of Aγ and/or Gγ subunits (referred to interchangeably as HbF expression), e.g. at least 5%, 10%, 15%, 20%, 25%, 30%, 35%, 40%, 45%, 50% or greater induction of Aγ and/or Gγ subunit expression relative to unmodified controls. This induction of protein expression is generally the result of alteration of the CCAAT box target region, 13 nt target region, proximal HBG1/2 promoter target sequence, and/or the GATA1 binding motif in BCL11Ae (expressed, e.g. in terms of the percentage of total genomes comprising indel mutations within the plurality of cells) in some or all of the plurality of cells that are treated, e.g. at least 5%, 10%, 15%, 20%, 25%, 30%, 35%, 40%, 45%, 50% of the plurality of cells comprise at least one allele comprising a sequence alteration, including, without limitation, an indel, insertion, or deletion in or near the CCAAT box target region, 13 nt target region, proximal HBG1/2 promoter target sequence, and/or the GATA1 binding motif in BCL11Ae.

[0246] The functional effects of alterations caused or facilitated by the genome editing systems and methods of the present disclosure can be assessed in any number of suitable ways. For example, the effects of alterations on expression of fetal hemoglobin can be assessed at the protein or mRNA level. Expression of HBG1 and HBG2 mRNA can be assessed by digital droplet PCR (ddPCR), which is performed on cDNA samples obtained by reverse transcription of mRNA harvested from treated or untreated samples. Primers for HBG1, HBG2, HBB, and/or HBA may be used individually or multiplexed using methods known in the art. For example, ddPCR analysis of samples may be conducted using the QX200™ ddPCR system commercialized by Bio Rad (Hercules, Calif.), and associated protocols published by BioRad. Fetal hemoglobin protein may be assessed by high pressure liquid chromatography (HPLC), for example, according to the methods discussed on pp. 143-44 in Chang 2017 (incorporated by reference herein), or fast protein liquid chromatography (FPLC), using ion-exchange and/or reverse phase columns to resolve HbF, HbB and HbA and/or Aγ and Gγ globin chains as is known in the art.

[0247] It should be noted that the rate at which the CCAAT box target region (e.g., 18 nt, 11 nt, 4 nt, 1 nt, c.−117 G>A target regions), 13 nt target region, proximal HBG1/2 promoter target sequence, and/or the GATA1 binding motif in BCL11Ae is altered in the target cells can be modified by the use of optional genome editing system components such as oligonucleotide donor templates. Donor template design is described in general terms below under the heading “Donor template design.” Donor templates for use in targeting the 13 nt target region may include, without limitation, donor templates encoding alterations (e.g., deletions) of HBG1 c.−114 to −102 (corresponding to nucleotides 2824-2836 of SEQ ID NO: 902), HBG1 c.−225 to −222 (corresponding to nucleotides 2716-2719 of SEQ ID NO:902)), and/or HBG2 c.−114 to −102 (corresponding to nucleotides 2748-2760 of SEQ ID NO:903). Exemplary 5′ and 3′ homology arms, and exemplary full-length donor templates encoding deletions such as c.−114 to −102 are also presented below (SEQ ID NOS: 904-909). In certain embodiments, donor templates for use in targeting the 18 nt target region may include, without limitation, donor templates encoding alterations (e.g., deletions) of HBG1 c.−104 to −121, HBG2 c.−104 to −121, or a combination thereof. Exemplary full-length donor templates encoding deletions such as c.−104 to −121 include SEQ ID NOs:974 and 975. In certain embodiments, donor templates for use in targeting the 11 nt target region may include, without limitation, donor templates encoding alterations (e.g., deletions) of HBG1 c.−105 to −115, HBG2 c.−105 to −115, or a combination thereof. Exemplary full-length donor templates encoding deletions such as c.−105 to −115 include SEQ ID NOs:976 and 978. In certain embodiments, donor templates for use in targeting the 4 nt target region may include, without limitation, donor templates encoding alterations (e.g., deletions) of HBG1 c.−112 to −115, HBG2 c.−112 to −115, or a combination thereof. Exemplary full-length donor templates encoding deletions such as c.−112 to −115 include SEQ ID NOs:984-995. In certain embodiments, donor templates for use in targeting the 1 nt target region may include, without limitation, donor templates encoding alterations (e.g., deletions) of HBG1 c.−116, HBG2 c.−116, or a combination thereof. Exemplary full-length donor templates encoding deletions such as c.−116 include SEQ ID NOs:982 and 983. In certain embodiments, donor templates for use in targeting the c.−117 G>A target region may include, without limitation, donor templates encoding alterations (e.g., deletions) of HBG1 c.−117 G>A, HBG2 c.−117 G>A, or a combination thereof. Exemplary full-length donor templates encoding deletions such as c.−117 G>A include SEQ ID NOs:980 and 981. In certain embodiments, the donor template may be a positive strand or a negative strand.

[0248] Donor templates used herein may be non-specific templates that are non-homologous to regions of DNA within or near the target sequence. In certain embodiments, donor templates for use in targeting the 13 nt target region may include, without limitation, non-target specific templates that are nonhomologous to regions of DNA within or near the 13 nt target region. For example, a non-specific donor template for use in targeting the 13 nt target region may be non-homologous to the regions of DNA within or near the 13 nt target region and may comprise a donor template encoding the deletion of HBG1 c.−225 to −222 (corresponding to nucleotides 2716-2719 of SEQ ID NO:902). In certain embodiments, donor templates for use in targeting the GATA1 binding motif in BCL11Ae may include, without limitation, non-target specific templates that are nonhomologous to regions of DNA within or near GATA1 binding motif in BCL11Ae target sequence. Other donor templates for use in targeting BCL11Ae may include, without limitation, donor templates including alterations (e.g., deletions) of BCL11Ae, including, without limitation, the GATA1 motif in BCL11Ae.

[0249] The embodiments described herein may be used in all classes of vertebrate including, but not limited to, primates, mice, rats, rabbits, pigs, dogs, and cats.

[0250] This overview has focused on a handful of exemplary embodiments that illustrate the principles of genome editing systems and CRISPR-mediated methods of altering cells. For clarity, however, this disclosure encompasses modifications and variations that have not been expressly addressed above, but will be evident to those of skill in the art. With that in mind, the following disclosure is intended to illustrate the operating principles of genome editing systems more generally. What follows should not be understood as limiting, but rather illustrative of certain principles of genome editing systems and CRISPR-mediated methods utilizing these systems, which, in combination with the instant disclosure, will inform those of skill in the art about additional implementations and modifications that are within its scope.

### RNA-Guided Helicases, Guide RNAs and Dead Guide RNAs

[0251] Various embodiments of the present disclosure also generally relate to genome editing systems configured to alter the helical structure of a nucleic acid to enhance genome editing of a target region (e.g., the CCAAT box target region, 13 nt target region, proximal HBG1/2 promoter target sequence, and/or the GATA1 binding motif in BCL11Ae) in the nucleic acid, and methods and compositions thereof. Many embodiments relate to the observation that positioning an event that alters the helical structure of DNA within or adjacent to target regions in nucleic acid may improve the activity of genome editing systems directed to such target regions. Without wishing to be bound by any theory, it is thought that alterations of helical structure (e.g., by unwinding) within or proximal to DNA target regions may induce or increase accessibility of a genome editing system to the target region, resulting in increased editing of the target regions by the genome editing system.

[0252] CRISPR nucleases evolved primarily to defend bacteria against viral pathogens, whose genomes are not naturally organized into chromatin. By contrast, when eukaryotic genomes are organized into nucleosomal units comprising genomic DNA segments coiled around histones. CRISPR nucleases from several bacterial families have been found to be inactive for editing eukaryotic DNA, suggesting the ability to edit nucleosome-bound DNA might differ across enzymes (Ran 2015). Biochemical evidence shows that S. pyogenes Cas9 can cleave DNA efficiently at nucleosome edges, but has reduced activity when the target site is positioned near the center of nucleosome dyad (Hinz 2016).

[0253] In many cell types, target sites of interest may be strongly bound by nucleosomes, or may only possess adjacent PAMs for enzymes that do not edit efficiently in the presence of nucleosomes. In this case, the problematic nucleosomes could be displaced first by using adjacent target sites that are closer to the nucleosome edge or are bound by an enzyme that is more effective at binding nucleosomal DNA. However, cleavage at these adjacent sites could be detrimental to the therapeutic strategy. Therefore, having a programmable enzyme that binds these adjacent sites but does not cleave can enable more efficient functional editing.

[0254] A related strategy utilizes recruitment of exogenous trans-acting factors to facilitate nucleosome displacement. However, the systems and methods of this disclosure are advantageous over this strategy because they do not require gRNA modifications beyond truncation of the targeting domain, do not require the recruitment of exogenous trans-acting factors, and do not require transcriptional activation to achieve increased rates of editing.

[0255] A variety of approaches to the unwinding and alteration of nucleic acid are employed in the various embodiments of this disclosure. One approach comprises unwinding (or opening of) a chromatin segment within or proximal to a target region (e.g., the CCAAT box target region, 13 nt target region, proximal HBG1/2 promoter target sequence, and/or the GATA1 binding motif in BCL11Ae) of a nucleic acid in a cell and generating a double stranded break (DSB) within the target region of the nucleic acid whereby the target region is altered. In certain embodiments, the DSB may be repaired in a manner that alters the target region. Unwinding the chromatin segment using the methods provided herein may facilitate increased access of catalytically active RNPs (e.g., catalytically active RNA-guided nucleases and gRNAs) to the chromatin to allow for more efficient editing of the DNA. For example, these methods may be used to edit target regions in chromatin that are difficult for a ribonucleoprotein (e.g., RNA-guided nuclease complexed to gRNA) to access because the chromatin is occupied by nucleosomes, such as closed chromatin. In certain embodiments, the unwinding of the chromatin segment occurs via RNA-guided helicase activity. In certain embodiments, the unwinding step does not require recruiting an exogenous trans-acting factor to the chromatin segment. In certain embodiments, the step of unwinding the chromatin segment does not comprise forming a single or double-stranded break in the nucleic acid within the chromatin segment.

[0256] In certain embodiments of the approaches and methods described above, the alteration of DNA helical structure is achieved through the action of an “RNA-guided helicase,” which term is generally used to refer to a molecule, typically a peptide, that (a) interacts (e.g., complexes) with a gRNA, and (b) together with the gRNA, associates with and unwinds a target site. RNA-guided helicases may, in certain embodiments, comprise RNA-guided nucleases configured to lack nuclease activity. However, the inventors have observed that even a cleavage-competent RNA-guided nuclease may be adapted for use as an RNA-guided helicase by complexing it to a dead gRNA having a truncated targeting domain of 15 or fewer nucleotides in length. Complexes of wild-type RNA-guided nucleases with dead gRNAs exhibit reduced or eliminated RNA-cleavage activity, but appear to retain helicase activity. RNA-guided helicases and dead gRNAs are described in greater detail below.

[0257] Regarding RNA-guided helicases, according to the present disclosure an RNA-guided helicase may comprise any of the RNA-guided nucleases disclosed herein and infra under the heading entitled “RNA-guided nucleases,” including, without limitation, a Cas9 or Cpf1 RNA-guided nuclease. The helicase activity of these RNA-guided nucleases allow for unwinding of DNA, providing increased access of genome editing system components (e.g., without limitation, catalytically active RNA-guided nuclease and gRNAs) to the desired target region to be edited (e.g., the CCAAT box target region, 13 nt target region, proximal HBG1/2 promoter target sequence, and/or the GATA1 binding motif in BCL11Ae). In certain embodiments, the RNA-guided nuclease may be a catalytically active RNA-guided nuclease with nuclease activity. In certain embodiments, the RNA-guided helicase may be configured to lack nuclease activity. For example, in certain embodiments, the RNA-guided helicase may be a catalytically inactive RNA-guided nuclease that lacks nuclease activity, such as a catalytically dead Cas9 molecule, which still provides helicase activity. In certain embodiments, an RNA-guided helicase may form a complex with a dead gRNA, forming a dead RNP that cannot cleave nucleic acid. In other embodiments, the RNA-guided helicase may be a catalytically active RNA-guided nuclease complexed to a dead gRNA, forming a dead RNP that cannot cleave nucleic acid. In certain embodiments, the RNA-guided nuclease is not configured to recruit an exogenous trans-acting factor to the desired target region to be edited (e.g., the CCAAT box target region, 13 nt target region, proximal HBG1/2 promoter target sequence, and/or the GATA1 binding motif in BCL11Ae).

[0258] Turning to dead gRNAs, these include any of the dead gRNAs discussed herein and infra under the heading entitled “Dead gRNA molecules.” Dead gRNAs (also referred to herein as “dgRNAs”) may be generated by truncating the 5′ end of a gRNA targeting domain sequence, resulting in a targeting domain sequence of 15 nucleotides or fewer in length. In certain embodiments, a dgRNA may be generated by truncating the 5′ end of any one of a gRNA targeting domain sequence disclosed herein in Table 2 or Table 10. Dead guide RNA molecules according to the present disclosure include dead guide RNA molecules that have reduced, low, or undetectable cleavage activity. The targeting domain sequences of dead guide RNAs may be shorter in length by 1, 2, 3, 4, 5, 6, 7, 8, 9, or 10 nucleotides compared to the targeting domain sequence of active guide RNAs. Dead gRNA molecules may comprise targeting domains complementary to regions proximal to or within a target region (e.g., the CCAAT box target region, 13 nt target region, proximal HBG1/2 promoter target sequence, and/or the GATA1 binding motif in BCL11Ae) in a target nucleic acid. In certain embodiments, “proximal to” may denote the region within 10, 25, 50, 100, or 200 nucleotides of a target region (e.g., the CCAAT box target region, 13 nt target region, proximal HBG1/2 promoter target sequence, and/or the GATA1 binding motif in BCL11Ae). In certain embodiments, dead gRNAs comprise targeting domains complementary to the transcription strand or non-transcription strand of DNA. In certain embodiments, the dead guide RNA is not configured to recruit an exogenous trans-acting factor to a target region (e.g., the CCAAT box target region, 13 nt target region, proximal HBG1/2 promoter target sequence, and/or the GATA1 binding motif in BCL11Ae).

[0259] Also provided herein are methods of increasing a rate of indel formation in a target nucleic acid by unwinding DNA within or proximal to the target region (e.g., the CCAAT box target region, 13 nt target region, proximal HBG1/2 promoter target sequence, and/or the GATA1 binding motif in BCL11Ae) using an RNA-guided helicase, generating a DSB within the target region, and forming an indel in the target region through repair of the DSB. The step of unwinding the DNA using an RNA-guided helicase provides for increased indel formation compared to a method of forming indels that does not use a helicase.

[0260] This disclosure further encompasses methods of deleting a segment of a target nucleic acid in a cell, comprising contacting the cell with an RNA-guided helicase and generating a double strand break (DSB) within the target region (e.g., the CCAAT box target region, 13 nt target region, proximal HBG1/2 promoter target sequence, and/or the GATA1 binding motif in BCL11Ae). In certain embodiments, the RNA-guided helicase is configured to associate within or proximal to a target region of the target nucleic acid and unwind double stranded DNA (dsDNA) within or proximal to the target region. In certain embodiments, the target nucleic acid is a promoter region of a gene, a coding region of a gene, a non-coding region of a gene, an intron of a gene, or an exon of a gene. In certain embodiments, the segment of the target nucleic acid to be deleted may is at least about 15, 20, 25, 30, 35, 40, 45, 50, 55, 60, 65, 70, 75, or 100 base pairs in length. In certain embodiments, the DSB is repaired in a manner that deletes the segment of the target nucleic acid.

[0261] Genome editing systems configured to introduce alterations of helical structure may be implemented in a variety of ways, as is discussed below in detail. As an example, a genome editing system of this disclosure can be implemented as a ribonucleoprotein complex or a plurality of complexes in which multiple gRNAs are used. In certain embodiments, a ribonucleoprotein complex of the genome editing system may be an RNA-guided helicase complexed to a dead guide RNA. Ribonucleoprotein complexes can be introduced into a target cell using art-known methods, including electroporation, as described in Gori. Genome editing systems incorporating RNA-guided helicases may also be modified in any suitable manner, including without limitation by the inclusion of one or more of a DNA donor template that encodes a specific mutation (such as a deletion or insertion) in or near the target region, and/or an agent that enhances the efficiency with which such mutations are generated including, without limitation, a random oligonucleotide, a small molecule agonist or antagonist of a gene product involved in DNA repair or a DNA damage response, or a peptide agent. These modifications are described in greater detail below, under the heading “Genome Editing Strategies.” For clarity, this disclosure includes compositions comprising one or more gRNAs, dead gRNAs, RNA-guided helicases, RNA-guided nucleases, or a combination thereof.

[0262] While several of the exemplary embodiments above have focused on DNA unwinding, it should be noted that other helical alterations are within the scope of the present disclosure. These include, without limitation, overwinding, underwinding, increase or decrease of torsional strain on DNA strands within or proximate to a target region (e.g., through topoisomerase activity), denaturation or strand separation, and/or other suitable alterations resulting in modifications of chromatin structure. Each of these alterations may be catalyzed by an RNA-guided activity, or by the recruitment of an endogenous factor to a target region.

[0263] Also provided herein are genome editing systems and methods of altering one or more indels (e.g., indel signature) generated by an active guide. As the inventors have discovered herein, pairing of a dead RNP (dRNP) (i.e., a dead guide RNA complexed with an RNA-guided nuclease) and an active RNP (i.e., an active guide RNA complexed with an RNA-guided nuclease) can result in a change of the directionality of the indels (e.g., indel signature) generated by the active RNP alone (without a dRNP). As shown in the examples below, the use of the dead guide RNA may result in an increased frequency of larger deletions extending from the active guide RNA cut site toward the dead guide RNA binding site. Thus, the dead guide RNA may be used to effectively “orient” deletion editing toward a desired target site. In certain embodiments, the use of the dead guide RNA with an active guide RNA may increase the frequency of deletions that are not associated with micro-homologies.

[0264] Although the examples disclosed in the Examples section below are directed to alterations of the CCAAT box target region, skilled artisans would contemplate that the genome editing systems, methods, cells and compositions described herein may be used to alter any other target region, for example, without limitation, to increase the frequency of deletions at the target region, increase the frequency of deletions at the target region that are not associated with micro-homologies (e.g., not repaired via MMEJ).

[0265] This overview has focused on a handful of exemplary embodiments that illustrate the principles of genome editing systems and CRISPR-mediated methods of altering cells. For clarity, however, this disclosure encompasses modifications and variations that have not been expressly addressed above, but will be evident to those of skill in the art. With that in mind, the following disclosure is intended to illustrate the operating principles of genome editing systems more generally. What follows should not be understood as limiting, but rather illustrative of certain principles of genome editing systems and CRISPR-mediated methods utilizing these systems, which, in combination with the instant disclosure, will inform those of skill in the art about additional implementations and modifications that are within its scope.

### Genome Editing Systems

[0266] The term “genome editing system” refers to any system having RNA-guided DNA editing activity. Genome editing systems of the present disclosure include at least two components adapted from naturally occurring CRISPR systems: a guide RNA (gRNA) and an RNA-guided nuclease. These two components form a complex that is capable of associating with a specific nucleic acid sequence and editing the DNA in or around that nucleic acid sequence, for instance by making one or more of a single-strand break (an SSB or nick), a double-strand break (a DSB) and/or a point mutation.

[0267] In certain embodiments, the genome editing systems in this disclosure may include a helicase for unwinding DNA. In certain embodiments, the helicase may be an RNA-guided helicase. In certain embodiments, the RNA-guided helicase may be an RNA-guided nuclease as described herein, such as a Cas9 or Cpf1 molecule. In certain embodiments, the RNA-guided nuclease is not configured to recruit an exogenous trans-acting factor to a target region. In certain embodiments, the RNA-guided nuclease may be configured to lack nuclease activity. In certain embodiments, the RNA-guided helicase may be complexed with a dead guide RNA as disclosed herein. For example, the dead guide RNA (dgRNA) may comprise a targeting domain sequence less than 15 nucleotides in length. In certain embodiments, the dead guide RNA is not configured to recruit an exogenous trans-acting factor to a target region.

[0268] Naturally occurring CRISPR systems are organized evolutionarily into two classes and five types (Makarova 2011, incorporated by reference herein), and while genome editing systems of the present disclosure may adapt components of any type or class of naturally occurring CRISPR system, the embodiments presented herein are generally adapted from Class 2, and type II or V CRISPR systems. Class 2 systems, which encompass types II and V, are characterized by relatively large, multidomain RNA-guided nuclease proteins (e.g., Cas9 or Cpf1) and one or more guide RNAs (e.g., a crRNA and, optionally, a tracrRNA) that form ribonucleoprotein (RNP) complexes that associate with (i.e. target) and cleave specific loci complementary to a targeting (or spacer) sequence of the crRNA. Genome editing systems according to the present disclosure similarly target and edit cellular DNA sequences, but differ significantly from CRISPR systems occurring in nature. For example, the unimolecular guide RNAs described herein do not occur in nature, and both guide RNAs and RNA-guided nucleases according to this disclosure may incorporate any number of non-naturally occurring modifications.

[0269] Genome editing systems can be implemented (e.g. administered or delivered to a cell or a subject) in a variety of ways, and different implementations may be suitable for distinct applications. For instance, a genome editing system is implemented, in certain embodiments, as a protein/RNA complex (a ribonucleoprotein, or RNP), which can be included in a pharmaceutical composition that optionally includes a pharmaceutically acceptable carrier and/or an encapsulating agent, such as, without limitation, a lipid or polymer micro- or nano-particle, micelle, or liposome. In certain embodiments, a genome editing system is implemented as one or more nucleic acids encoding the RNA-guided nuclease and guide RNA components described above (optionally with one or more additional components); in certain embodiments, the genome editing system is implemented as one or more vectors comprising such nucleic acids, for instance a viral vector such as an adeno-associated virus (see section below under the heading “Implementation of genome editing systems: delivery, formulations, and routes of administration”); and in certain embodiments, the genome editing system is implemented as a combination of any of the foregoing. Additional or modified implementations that operate according to the principles set forth herein will be apparent to the skilled artisan and are within the scope of this disclosure.

[0270] It should be noted that the genome editing systems of the present disclosure can be targeted to a single specific nucleotide sequence, or may be targeted to—and capable of editing in parallel—two or more specific nucleotide sequences through the use of two or more guide RNAs. The use of multiple gRNAs is referred to as “multiplexing” throughout this disclosure, and can be employed to target multiple, unrelated target sequences of interest, or to form multiple SSBs or DSBs within a single target domain and, in some cases, to generate specific edits within such target domain. For example, International Patent Publication No. WO 2015/138510 by Maeder et al. (“Maeder”), which is incorporated by reference herein, describes a genome editing system for correcting a point mutation (C.2991+1655A to G) in the human CEP290 gene that results in the creation of a cryptic splice site, which in turn reduces or eliminates the function of the gene. The genome editing system of Maeder utilizes two guide RNAs targeted to sequences on either side of (i.e. flanking) the point mutation, and forms DSBs that flank the mutation. This, in turn, promotes deletion of the intervening sequence, including the mutation, thereby eliminating the cryptic splice site and restoring normal gene function.

[0271] As another example, WO 2016/073990 by Cotta-Ramusino et al. (“Cotta-Ramusino”), which is incorporated by reference herein, describes a genome editing system that utilizes two gRNAs in combination with a Cas9 nickase (a Cas9 that makes a single strand nick such as S. pyogenes D10A), an arrangement termed a “dual-nickase system.” The dual-nickase system of Cotta-Ramusino is configured to make two nicks on opposite strands of a sequence of interest that are offset by one or more nucleotides, which nicks combine to create a double strand break having an overhang (5′ in the case of Cotta-Ramusino, though 3′ overhangs are also possible). The overhang, in turn, can facilitate homology directed repair events in some circumstances. And, as another example, WO 2015/070083 by Palestrant et al. (incorporated by reference herein) describes a gRNA targeted to a nucleotide sequence encoding Cas9 (referred to as a “governing RNA”), which can be included in a genome editing system comprising one or more additional gRNAs to permit transient expression of a Cas9 that might otherwise be constitutively expressed, for example in some virally transduced cells. These multiplexing applications are intended to be exemplary, rather than limiting, and the skilled artisan will appreciate that other applications of multiplexing are generally compatible with the genome editing systems described here.

[0272] As disclosed herein, in certain embodiments, genome editing systems may comprise multiple gRNAs that may be used to introduce mutations into the GATA1 binding motif in BCL11Ae or the 13 nt target region of HBG1 and/or HBG2. In certain embodiments, genome editing systems disclosed herein may comprise multiple gRNAs used to introduce mutations into the GATA1 binding motif in BCL11Ae and the 13 nt target region of HBG1 and/or HBG2.

[0273] Genome editing systems can, in some instances, form double strand breaks that are repaired by cellular DNA double-strand break mechanisms such as NHEJ or HDR. These mechanisms are described throughout the literature (see, e.g., Davis & Maizels 2014 (describing Alt-HDR); Frit 2014 (describing Alt-NHEJ); Iyama & Wilson 2013 (describing canonical HDR and NHEJ pathways generally)).

[0274] Where genome editing systems operate by forming DSBs, such systems optionally include one or more components that promote or facilitate a particular mode of double-strand break repair or a particular repair outcome. For instance, Cotta-Ramusino also describes genome editing systems in which a single stranded oligonucleotide “donor template” is added; the donor template is incorporated into a target region of cellular DNA that is cleaved by the genome editing system, and can result in a change in the target sequence.

[0275] In certain embodiments, genome editing systems modify a target sequence, or modify expression of a gene in or near the target sequence, without causing single- or double-strand breaks. For example, a genome editing system may include an RNA-guided nuclease fused to a functional domain that acts on DNA, thereby modifying the target sequence or its expression. As one example, an RNA-guided nuclease can be connected to (e.g. fused to) a cytidine deaminase functional domain, and may operate by generating targeted C-to-A substitutions. Exemplary nuclease/deaminase fusions are described in Komor 2016, which is incorporated by reference herein. Alternatively, a genome editing system may utilize a cleavage-inactivated (i.e. a “dead”) nuclease, such as a dead Cas9 (dCas9), and may operate by forming stable complexes on one or more targeted regions of cellular DNA, thereby interfering with functions involving the targeted region(s) including, without limitation, mRNA transcription, chromatin remodeling, etc. In certain embodiments, a genome editing system may include an RNA-guided helicase that unwinds DNA within or proximal to the target sequence, without causing single- or double-stranded breaks. For example a genome editing system may include an RNA-guided helicase configured to associate within or near the target sequence to unwind DNA and induce accessibility to the target sequence. In certain embodiments, the RNA-guided helicase may be complexed to a dead guide RNA that is configured to lack cleavage activity allowing for unwinding of the DNA without causing breaks in the DNA.

Guide RNA (gRNA) Molecules

[0276] The terms “guide RNA” and “gRNA” refer to any nucleic acid that promotes the specific association (or “targeting”) of an RNA-guided nuclease such as a Cas9 or a Cpf1 to a target sequence such as a genomic or episomal sequence in a cell. gRNAs can be unimolecular (comprising a single RNA molecule, and referred to alternatively as chimeric), or modular (comprising more than one, and typically two, separate RNA molecules, such as a crRNA and a tracrRNA, which are usually associated with one another, for instance by duplexing). gRNAs and their component parts are described throughout the literature (see, e.g., Briner 2014, which is incorporated by reference; Cotta-Ramusino). Examples of modular and unimolecular gRNAs that may be used according to the embodiments herein include, without limitation, the sequences set forth in SEQ ID NOs:29-31 and 38-51. Examples of gRNA proximal and tail domains that may be used according to the embodiments herein include, without limitation, the sequences set forth in SEQ ID NOs:32-37.

[0277] In bacteria and archea, type II CRISPR systems generally comprise an RNA-guided nuclease protein such as Cas9, a CRISPR RNA (crRNA) that includes a 5′ region that is complementary to a foreign sequence, and a trans-activating crRNA (tracrRNA) that includes a 5′ region that is complementary to, and forms a duplex with, a 3′ region of the crRNA. While not intending to be bound by any theory, it is thought that this duplex facilitates the formation of—and is necessary for the activity of—the Cas9/gRNA complex. As type II CRISPR systems were adapted for use in gene editing, it was discovered that the crRNA and tracrRNA could be joined into a single unimolecular or chimeric guide RNA, in one non-limiting example, by means of a four nucleotide (e.g. GAAA) “tetraloop” or “linker” sequence bridging complementary regions of the crRNA (at its 3′ end) and the tracrRNA (at its 5′ end). (Mali 2013; Jiang 2013; Jinek 2012; all incorporated by reference herein).

[0278] Guide RNAs, whether unimolecular or modular, include a “targeting domain” that is fully or partially complementary to a target domain within a target sequence, such as a DNA sequence in the genome of a cell where editing is desired. Targeting domains are referred to by various names in the literature, including without limitation “guide sequences” (Hsu 2013, incorporated by reference herein), “complementarity regions” (Cotta-Ramusino), “spacers” (Briner 2014) and generically as “crRNAs” (Jiang). Irrespective of the names they are given, targeting domains are typically 10-30 nucleotides in length, and in certain embodiments are 16-24 nucleotides in length (for instance, 16, 17, 18, 19, 20, 21, 22, 23 or 24 nucleotides in length), and are at or near the 5′ terminus of in the case of a Cas9 gRNA, and at or near the 3′ terminus in the case of a Cpf1 gRNA.

[0279] In addition to the targeting domains, gRNAs typically (but not necessarily, as discussed below) include a plurality of domains that may influence the formation or activity of gRNA/Cas9 complexes. For instance, as mentioned above, the duplexed structure formed by first and secondary complementarity domains of a gRNA (also referred to as a repeat:anti-repeat duplex) interacts with the recognition (REC) lobe of Cas9 and can mediate the formation of Cas9/gRNA complexes (Nishimasu 2014; Nishimasu 2015; both incorporated by reference herein). It should be noted that the first and/or second complementarity domains may contain one or more poly-A tracts, which can be recognized by RNA polymerases as a termination signal. The sequence of the first and second complementarity domains are, therefore, optionally modified to eliminate these tracts and promote the complete in vitro transcription of gRNAs, for instance through the use of A-G swaps as described in Briner 2014, or A-U swaps. These and other similar modifications to the first and second complementarity domains are within the scope of the present disclosure.

[0280] Along with the first and second complementarity domains, Cas9 gRNAs typically include two or more additional duplexed regions that are involved in nuclease activity in vivo but not necessarily in vitro. (Nishimasu 2015). A first stem-loop one near the 3′ portion of the second complementarity domain is referred to variously as the “proximal domain,” (Cotta-Ramusino) “stem loop 1” (Nishimasu 2014 and 2015) and the “nexus” (Briner 2014). One or more additional stem loop structures are generally present near the 3′ end of the gRNA, with the number varying by species: S. pyogenes gRNAs typically include two 3′ stem loops (for a total of four stem loop structures including the repeat:anti-repeat duplex), while S. aureus and other species have only one (for a total of three stem loop structures). A description of conserved stem loop structures (and gRNA structures more generally) organized by species is provided in Briner 2014.

[0281] While the foregoing description has focused on gRNAs for use with Cas9, it should be appreciated that other RNA-guided nucleases exist which utilize gRNAs that differ in some ways from those described to this point. For instance, Cpf1 (“CRISPR from Prevotella and Franciscella 1”) is a recently discovered RNA-guided nuclease that does not require a tracrRNA to function. (Zetsche 2015, incorporated by reference herein). A gRNA for use in a Cpf1 genome editing system generally includes a targeting domain and a complementarity domain (alternately referred to as a “handle”). It should also be noted that, in gRNAs for use with Cpf1, the targeting domain is usually present at or near the 3′ end, rather than the 5′ end as described above in connection with Cas9 gRNAs (the handle is at or near the 5′ end of a Cpf1 gRNA). Exemplary targeting domains of Cpf1 gRNAs are set forth in Table 13 and Table 18.

[0282] Those of skill in the art will appreciate, however, that although structural differences may exist between gRNAs from different prokaryotic species, or between Cpf1 and Cas9 gRNAs, the principles by which gRNAs operate are generally consistent. Because of this consistency of operation, gRNAs can be defined, in broad terms, by their targeting domain sequences, and skilled artisans will appreciate that a given targeting domain sequence can be incorporated in any suitable gRNA, including a unimolecular or chimeric gRNA, or a gRNA that includes one or more chemical modifications and/or sequential modifications (substitutions, additional nucleotides, truncations, etc.). Thus, for economy of presentation in this disclosure, gRNAs may be described solely in terms of their targeting domain sequences.

[0283] More generally, skilled artisans will appreciate that some aspects of the present disclosure relate to systems, methods and compositions that can be implemented using multiple RNA-guided nucleases. For this reason, unless otherwise specified, the term gRNA should be understood to encompass any suitable gRNA that can be used with any RNA-guided nuclease, and not only those gRNAs that are compatible with a particular species of Cas9 or Cpf1. By way of illustration, the term gRNA can, in certain embodiments, include a gRNA for use with any RNA-guided nuclease occurring in a Class 2 CRISPR system, such as a type II or type V or CRISPR system, or an RNA-guided nuclease derived or adapted therefrom.

[0284] gRNA Design

[0285] Methods for selection and validation of target sequences as well as off-target analyses have been described previously (see, e.g., Mali 2013; Hsu 2013; Fu 2014; Heigwer 2014; Bae 2014; Xiao 2014). Each of these references is incorporated by reference herein. As a non-limiting example, gRNA design may involve the use of a software tool to optimize the choice of potential target sequences corresponding to a user's target sequence, e.g., to minimize total off-target activity across the genome. While off-target activity is not limited to cleavage, the cleavage efficiency at each off-target sequence can be predicted, e.g., using an experimentally-derived weighting scheme. These and other guide selection methods are described in detail in Maeder and Cotta-Ramusino.

[0286] With respect to selection of gRNA targeting domain sequences directed to HBG1/2 target sites (e.g. the 13 nt target region), an in-silico gRNA target domain identification tool was utilized, and the hits were stratified into four tiers. For S. pyogenes, tier 1 targeting domains were selected based on (1) distance upstream or downstream from either end of the target site (i.e., HBG1/2 13 nt target region), specifically within 400 bp of either end of the target site, (2) a high level of orthogonality, and (3) the presence of 5′ G. Tier 2 targeting domains were selected based on (1) distance upstream or downstream from either end of the target site (i.e., HBG1/2 13 nt target region), specifically within 400 bp of either end of the target site, and (2) a high level of orthogonality. Tier 3 targeting domains were selected based on (1) distance upstream or downstream from either end of the target site (i.e., HBG1/2 13 nt target region), specifically within 400 bp of either end of the target site and (2) the presence of 5′ G. Tier 4 targeting domains were selected based on distance upstream or downstream from either end of the target site (i.e., HBG1/2 13 nt target region), specifically within 400 bp of either end of the target site.

[0287] For S. aureus, tier 1 targeting domains were selected based on (1) distance upstream or downstream from either end of the target site (i.e., HBG1/2 13 nt target region), specifically within 400 bp of either end of the target site, (2) a high level of orthogonality, (3) the presence of 5′ G, and (4) PAM having the sequence NNGRRT (SEQ ID NO:204). Tier 2 targeting domains were selected based on (1) distance upstream or downstream from either end of the target site (i.e., HBG1/2 13 nt target), specifically within 400 bp of either end of the target site, (2) a high level of orthogonality, and (3) PAM having the sequence NNGRRT (SEQ ID NO:204). Tier 3 targeting domains were selected based on (1) distance upstream or downstream from either end of the target site (i.e., HBG1/2 13 nt target region), specifically within 400 bp of either end of the target site, and (2) PAM having the sequence NNGRRT (SEQ ID NO:204). Tier 4 targeting domains were selected based on (1) distance upstream or downstream from either end of the target site (i.e., HBG1/2 13 nt target), specifically within 400 bp of either end of the target site, and (2) PAM having the sequence NNGRRV (SEQ ID NO:205).

[0288] Table 2, below, presents targeting domains for S. pyogenes and S. aureus gRNAs, broken out by (a) tier (1, 2, 3 or 4) and (b) HBG1 or HBG2.

TABLE 2
gRNA targeting domain sequences for HBG1/2 target sites

| | | HBG1 | HBG2 |
|---|---|---|---|
| S. pyogenes | Tier 1 | 251-256 | 760-764 |
| | Tier 2 | 257-274 | 765-781 |
| | Tier 3 | 275-300 | 275-281, 283-300 |
| | Tier 4 | 301-366 | 301-311, 313-342, 344-348, |
| | | | 350-366, 782, 783 |
| S. aureus | Tier 1 | 367-376 | 784-791 |
| | Tier 2 | 343, 377-393 | 778, 792-803 |
| | Tier 3 | 357, 365, 394-461 | 357, 365, 394-461 |
| | Tier 4 | 252-254, 256, 268, | 292, 295, 347, 348, 353, |
| | | 272-274, 292, 295, | 360-362, 366, 462-468 476- |
| | | 347, 348, 353, 360- | 481, 489-587, 601-607, |
| | | 362, 366, 598-759 | 614-620, 640-666, 674-679, |
| | | | 687-693, 708-714, 733-753, |
| | | | 762-764, 775, 779-781, |
| | | | 804-901 |

[0289] Additional gRNA sequences that were designed to target alteration of the CCAAT box target region include, but are not limited to, the sequences set forth in SEQ ID NOs:970 and 971. Targeting domain sequences of gRNAs that were designed to target disruption of the CCAAT box target region include, but are not limited to, SEQ ID NO:1002. Targeting domain sequences plus PAM (UUUG) of gRNAs that were designed to target disruption of the CCAAT box target region include, but are not limited to, SEQ ID NO: 1004. In certain embodiments, gRNAs comprising the sequence set forth in SEQ ID NOs:1002 and/or 1004 may be complexed with a Cpf1 protein or modified Cpf1 protein to generate alterations at the CCAAT box target region. In certain embodiments, gRNAs comprising any of the Cpf1 gRNAs set forth in Table 15, Table 18, or Table 19 may be complexed with a Cpf1 protein or modified Cpf1 protein forming an RNP (“gRNA-Cpf1-RNP”) to generate alterations at the CCAAT box target region. In certain embodiments, the modified Cpf1 protein may be His-AsCpf1-nNLS (SEQ ID NO: 1000) or His-AsCpf1-sNLS-sNLS (SEQ ID NO:1001). In certain embodiments, the Cpf1 molecule of the gRNA-Cpf1-RNP may be encoded by a sequence set forth in SEQ ID NOs:1000, 1001, 1008-1018, 1032, 1035-39 (Cpf1 polypeptide sequences) or SEQ ID NOs:1019-1021 (Cpf1 polynucleotide sequences).

[0290] gRNAs may be designed to target the erythroid specific enhancer of BCL11A (BCL11Ae) to disrupt expression of a transcriptional repressor, BCL11 A (described in Friedland, which is incorporated by reference herein). gRNAs were designed to target the GATA1 binding motif that is in the erythroid specific enhancer of BCL11A that is in the +58 DHS region of intron 2 (i.e., the GATA1 binding motif in BCL11Ae), where the +58 DHS enhancer region comprises the sequence set forth in SEQ ID NO:968. Targeting domain sequences of gRNAs that were designed to target disruption of the GATA1 binding motif in BCL11Ae, include, but are not limited to, the sequences set forth in SEQ ID NOs:952-955. Targeting domain sequences plus PAM (NGG) of gRNAs that were designed to target disruption of the GATA1 binding motif in BCL11Ae, include, but are not limited to, the sequences set forth in SEQ ID NOs:960-963.

gRNA Modifications

[0291] The activity, stability, or other characteristics of gRNAs can be altered through the incorporation of certain modifications. As one example, transiently expressed or delivered nucleic acids can be prone to degradation by, e.g., cellular nucleases. Accordingly, the gRNAs described herein can contain one or more modified nucleosides or nucleotides which introduce stability toward nucleases. While not wishing to be bound by theory it is also believed that certain modified gRNAs described herein can exhibit a reduced innate immune response when introduced into cells. Those of skill in the art will be aware of certain cellular responses commonly observed in cells, e.g., mammalian cells, in response to exogenous nucleic acids, particularly those of viral or bacterial origin. Such responses, which can include induction of cytokine expression and release and cell death, may be reduced or eliminated altogether by the modifications presented herein.

[0292] Certain exemplary modifications discussed in this section can be included at any position within a gRNA sequence including, without limitation at or near the 5′ end (e.g., within 1-10, 1-5, or 1-2 nucleotides of the 5′ end) and/or at or near the 3′ end (e.g., within 1-10, 1-5, or 1-2 nucleotides of the 3′ end). In some cases, modifications are positioned within functional motifs, such as the repeat-anti-repeat duplex of a Cas9 gRNA, a stem loop structure of a Cas9 or Cpf1 gRNA, and/or a targeting domain of a gRNA.

[0293] As one example, the 5′ end of a gRNA can include a eukaryotic mRNA cap structure or cap analog (e.g., a G(5′)ppp(5′)G cap analog, a m7G(5′)ppp(5′)G cap analog, or a 3′-O-Me-m7G(5′)ppp(5′)G anti reverse cap analog (ARCA)), as shown below:

[chemical structure]

The cap or cap analog can be included during either chemical synthesis or in vitro transcription of the gRNA.

[0294] Along similar lines, the 5′ end of the gRNA can lack a 5′ triphosphate group. For instance, in vitro transcribed gRNAs can be phosphatase-treated (e.g., using calf intestinal alkaline phosphatase) to remove a 5′ triphosphate group.

[0295] Another common modification involves the addition, at the 3′ end of a gRNA, of a plurality (e.g., 1-10, 10-20, or 25-200) of adenine (A) residues referred to as a polyA tract. The polyA tract can be added to a gRNA during chemical synthesis, following in vitro transcription using a polyadenosine polymerase (e.g., E. coli Poly(A)Polymerase), or in vivo by means of a polyadenylation sequence, as described in Maeder.

[0296] It should be noted that the modifications described herein can be combined in any suitable manner, e.g. a gRNA, whether transcribed in vivo from a DNA vector, or in vitro transcribed gRNA, can include either or both of a 5′ cap structure or cap analog and a 3′ polyA tract.

[0297] Guide RNAs can be modified at a 3′ terminal U ribose. For example, the two terminal hydroxyl groups of the U ribose can be oxidized to aldehyde groups and a concomitant opening of the ribose ring to afford a modified nucleoside as shown below:

[chemical structure]

wherein “U” can be an unmodified or modified uridine.

[0298] The 3′ terminal U ribose can be modified with a 2′3′ cyclic phosphate as shown below:

[chemical structure]

wherein “U” can be an unmodified or modified uridine.

[0299] Guide RNAs can contain 3′ nucleotides which can be stabilized against degradation, e.g., by incorporating one or more of the modified nucleotides described herein. In certain embodiments, uridines can be replaced with modified uridines, e.g., 5-(2-amino)propyl uridine, and 5-bromo uridine, or with any of the modified uridines described herein; adenosines and guanosines can be replaced with modified adenosines and guanosines, e.g., with modifications at the 8-position, e.g., 8-bromo guanosine, or with any of the modified adenosines or guanosines described herein.

[0300] In certain embodiments, sugar-modified ribonucleotides can be incorporated into the gRNA, e.g., wherein the 2′ OH-group is replaced by a group selected from H, —OR, —R (wherein R can be, e.g., alkyl, cycloalkyl, aryl, aralkyl, heteroaryl or sugar), halo, —SH, —SR (wherein R can be, e.g., alkyl, cycloalkyl, aryl, aralkyl, heteroaryl or sugar), amino (wherein amino can be, e.g., NH₂; alkylamino, dialkylamino, heterocyclyl, arylamino, diarylamino, heteroarylamino, diheteroarylamino, or amino acid); or cyano (—CN). In certain embodiments, the phosphate backbone can be modified as described herein, e.g., with a phosphorothioate (PhTx) group. In certain embodiments, one or more of the nucleotides of the gRNA can each independently be a modified or unmodified nucleotide including, but not limited to 2′-sugar modified, such as, 2′-O-methyl, 2′-O-methoxyethyl, or 2′-Fluoro modified including, e.g., 2′-F or 2′-O-methyl, adenosine (A), 2′-F or 2′-O-methyl, cytidine (C), 2′-F or 2′-O-methyl, uridine (U), 2′-F or 2′-O-methyl, thymidine (T), 2′-F or 2′-O-methyl, guanosine (G), 2′-O-methoxyethyl-5-methyluridine (Teo), 2′-O-methoxyethyladenosine (Aeo), 2′-O-methoxyethyl-5-methylcytidine (m5Ceo), and any combinations thereof.

[0301] Guide RNAs can also include “locked” nucleic acids (LNA) in which the 2′ OH-group can be connected, e.g., by a C1-6 alkylene or C1-6 heteroalkylene bridge, to the 4′ carbon of the same ribose sugar. Any suitable moiety can be used to provide such bridges, include without limitation methylene, propylene, ether, or amino bridges; O-amino (wherein amino can be, e.g., NH₂; alkylamino, dialkylamino, heterocyclyl, arylamino, diarylamino, heteroarylamino, or diheteroarylamino, ethylenediamine, or polyamino) and aminoalkoxy or O(CH₂)ₙ-amino (wherein amino can be, e.g., NH₂; alkylamino, dialkylamino, heterocyclyl, arylamino, diarylamino, heteroarylamino, or diheteroarylamino, ethylenediamine, or polyamino).

[0302] In certain embodiments, a gRNA can include a modified nucleotide which is multicyclic (e.g., tricyclo; and “unlocked” forms, such as glycol nucleic acid (GNA) (e.g., R-GNA or S-GNA, where ribose is replaced by glycol units attached to phosphodiester bonds), or threose nucleic acid (TNA, where ribose is replaced with α-L-threofuranosyl-(3′→2′)).

[0303] Generally, gRNAs include the sugar group ribose, which is a 5-membered ring having an oxygen. Exemplary modified gRNAs can include, without limitation, replacement of the oxygen in ribose (e.g., with sulfur (S), selenium (Se), or alkylene, such as, e.g., methylene or ethylene); addition of a double bond (e.g., to replace ribose with cyclopentenyl or cyclohexenyl); ring contraction of ribose (e.g., to form a 4-membered ring of cyclobutane or oxetane); ring expansion of ribose (e.g., to form a 6- or 7-membered ring having an additional carbon or heteroatom, such as for example, anhydrohexitol, altritol, mannitol, cyclohexanyl, cyclohexenyl, and morpholino that also has a phosphoramidate backbone). Although the majority of sugar analog alterations are localized to the 2′ position, other sites are amenable to modification, including the 4′ position. In certain embodiments, a gRNA comprises a 4′-S, 4′-Se or a 4′-C-aminomethyl-2′-O-Me modification.

[0304] In certain embodiments, deaza nucleotides, e.g., 7-deaza-adenosine, can be incorporated into the gRNA. In certain embodiments, O- and N-alkylated nucleotides, e.g., N6-methyl adenosine, can be incorporated into the gRNA. In certain embodiments, one or more or all of the nucleotides in a gRNA are deoxynucleotides.

[0305] In certain embodiments, gRNAs as used herein may be modified or unmodified gRNAs. In certain embodiments, a gRNA may include one or more modifications. In certain embodiments, the one or more modifications may include a phosphorothioate linkage modification, a phosphorodithioate (PS2) linkage modification, a 2′-O-methyl modification, or combinations thereof. In certain embodiments, the one or more modifications may be at the 5′ end of the gRNA, at the 3′ end of the gRNA, or combinations thereof.

[0306] In certain embodiments, a gRNA modification may comprise one or more phosphorodithioate (PS2) linkage modifications.

[0307] In some embodiments, a gRNA used herein includes one or more or a stretch of deoxyribonucleic acid (DNA) bases, also referred to herein as a “DNA extension” In some embodiments, a gRNA used herein inchides a DNA extension at the 5′ end of the gRNA, the 3′ end of the gRNA, or a combination thereof. In certain embodiments, the DNA extension may be 1, 2, 3, 4, 5, 6, 7, 8, 9, 10, 11, 12, 13, 14, 15, 16, 17, 18, 19, 20, 21, 22, 23, 24, 25, 26, 27, 28, 29, 30, 31, 32, 33, 34, 35, 36, 37, 38, 39, 40, 41, 42, 43, 44, 45, 46, 47, 48, 49, 50, 51, 52, 53, 54, 55, 56, 57, 58, 59, 60, 61, 62, 63, 64, 65, 66, 67 68, 69, 70, 71, 72, 73, 74, 75, 76, 77, 78, 79, 80, 81, 82, 83, 84, 85, 86, 87, 88, 89, 90, 91, 92, 93, 94, 95, 96, 97, 98, 99, or 100 DNA bases long. For example, in certain embodiments, the DNA extension may be 1, 2, 3, 4, 5, 10, 15, 20, or 25 DNA bases long. In certain embodiments, the DNA extension may include one or more DNA bases selected from adenine (A), guanine (G), cytosinc (C), or thymine (T). In certain embodiments, the DNA extension includes the same DNA bases. For example, the DNA extension may include a stretch of adenine (A) bases. In certain embodiments, the DNA extension may include a stretch of thymine (T) bases. In certain embodiments, the DNA extension includes a combination of different DNA bases. In certain embodiments, a DNA extension may comprise a sequence set forth in Table 24. For example, a DNA extension may comprise a sequence set forth in SEQ ID NOs:1235-1250. In certain embodiments, a gRNA used herein includes a DNA extension as well as one or more phosphorothioate linkage modifications, one or more phosphorodithioate (PS2) linkage modifications, one or more 2′-O-methyl modifications, or combinations thereof. In certain embodiments, the one or more modifications may be at the 5′ end of the gRNA, at the 3′ end of the gRNA, or combinations thereof. In certain embodiments, a gRNA including a DNA extension may comprise a sequence set forth in Table 19 that includes a DNA extension. In a particular embodiment, a gRNA including a DNA extension may comprise the sequence set forth in SEQ ID NO:1051. In certain embodiments, a gRNA including a DNA extension may comprise a sequence selected from the group consisting of SEQ ID NOs:1046-1060, 1067, 1068, 1074, 1075, 1078, 1081-1084, 1086-1087, 1089-1090, 1092-1093, 1098-1102, and 1106. Without wishing to be bound by theory, it is contemplated that any DNA extension may be used herein, so long as it does not hybridize to the target nucleic acid being targeted by the gRNA and it also exhibits an increase in editing at the target nucleic acid site relative to a gRNA which does not include such a DNA extension.

[0308] In some embodiments, a gRNA used herein includes one or more or a stretch of ribonucleic acid (RNA) bases, also referred to herein as an “RNA extension.” In some embodiments, a gRNA used herein includes an RNA extension at the 5′ end of the gRNA, the 3′ end of the gRNA, or a combination thereof. In certain embodiments, the RNA extension may be 1, 2, 3, 4, 5, 6, 7, 8, 9, 10, 11, 12, 13, 14, 15, 16, 17, 18, 19, 20, 21, 22, 23, 24, 25, 26, 27, 28, 29, 30, 31, 32, 33, 34, 35, 36, 37, 38, 39, 40, 41, 42, 43, 44, 45, 46, 47, 48, 49, 50, 51, 52, 53, 54, 55, 56, 57, 58, 59, 60, 61, 62, 63, 64, 65, 66, 67, 68, 69, 70, 71, 72, 73, 74, 75, 76, 77, 78, 79, 80, 81, 82, 83, 84, 85, 86, 87, 88, 89, 90, 91, 92, 93, 94, 95, 96, 97, 98, 99, or 100 RNA bases long. For example, in certain embodiments, the RNA extension may be 1, 2, 3, 4, 5, 10, 15, 20, or 25 RNA bases long. In certain embodiments, the RNA extension may include one or more RNA bases selected from adenine (rA), guanine (rG), cytosine (rC), or uracil (rU), in which the “r” represents RNA, 2′-hydroxy. In certain embodiments, the RNA extension includes the same RNA bases. For example, the RNA extension may include a stretch of adenine (rA) bases. In certain embodiments, the RNA extension includes a combination of different RNA bases. In certain embodiments, an RNA extension may comprise a sequence set forth in Table 24. For example, an RNA extension may comprise a sequence set forth in 1231-1234, 1251-1253. In certain embodiments, a gRNA used herein includes an RNA extension as well as one or more phosphorothioate linkage modifications, one or more phosphorodithioate (PS2) linkage modifications, one or more 2′-O-methyl modifications, or combinations thereof. In certain embodiments, the one or more modifications may be at the 5′ end of the gRNA, at the 3′ end of the gRNA, or combinations thereof. In certain embodiments, a gRNA including a RNA extension may comprise a sequence set forth in Table 19 that includes an RNA extension. gRNAs including an RNA extension at the 5′ end of the gRNA may comprise a sequence selected from the group consisting of SEQ ID NOs:1042-1045, 1103-1105. gRNAs including an RNA extension at the 3′ end of the gRNA may comprise a sequence selected from the group consisting of SEQ ID NOs:1070-1075, 1079, 1081, 1098-1100.

[0309] It is contemplated that gRNAs used herein may also include an RNA extension and a DNA extension. In certain embodiments, the RNA extension and DNA extension may both be at the 5′ end of the gRNA, the 3′ end of the gRNA, or a combination thereof. In certain embodiments, the RNA extension is at the 5′ end of the gRNA and the DNA extension is at the 3′ end of the gRNA. In certain embodiments, the RNA extension is at the 3′ end of the gRNA and the DNA extension is at the 5′ end of the gRNA.

[0310] In some embodiments, a gRNA which includes both a phosphorothioate modification at the 3′ end as well as a DNA extension at the 5′ end is complexed with a RNA-guided nuclease, e.g., Cpf1, to form an RNP, which is then employed to edit a hematopoietic stem cell (HSC) or a CD34+ cell ex vivo (i.e., outside the body of a subject from whom such a cell is derived), at the HBO locus.

[0311] An example of a gRNA as used herein comprises the sequence set forth in SEQ ID NO:1051.

[0312] Dead gRNA Molecules

[0313] Dead guide RNA (dgRNA) molecules according to the present disclosure include dead guide RNA molecules that comprise reduced, low, or undetectable cleavage activity. The targeting domain sequences of dead guide RNAs are shorter in length by 1, 2, 3, 4, 5, 6, 7, 8, 9, or 10 nucleotides compared to the targeting domain sequence of active guide RNAs. In certain embodiments, dead guide RNA molecules may comprise a targeting domain comprising 15 nucleotides or fewer in length, 14 nucleotides or fewer in length, 13 nucleotides or fewer in length, 12 nucleotides or fewer in length, or 11 nucleotides or fewer in length. In some embodiments, dead guide RNAs are configured such that they do not provide an RNA guided-nuclease cleavage event. Dead guide RNAs may be generated by removing the 5′ end of a gRNA targeting domain sequence, which results in a truncated targeting domain sequence. For example, if a gRNA sequence, configured to provide a cleavage event (i.e., 17 nucleotides or more in length), has a targeting domain sequence that is 20 nucleotides in length, a dead guide RNA may be created by removing 5 nucleotides from the 5′ end of the gRNA sequence. For example, dgRNAs used herein may comprise a targeting domain set forth in Table 2 or Table 10 that has been truncated from the 5′ end of the gRNA sequence and comprises 15 nucleotides or fewer in length. In certain embodiments, the dgRNA may be configured to bind (or associate with) a nucleic acid sequence within or proximal to a target region (e.g., the CCAAT box target region, 13 nt target region, proximal HBG1/2 promoter target sequence, and/or the GATA1 binding motif in BCL11Ae) to be edited. For example, any of the dgRNAs set forth in Table 10 may be employed to bind a nucleic acid sequence proximal to the 13 nt target region or CCAAT box target region. In certain embodiments, proximal to may denote the region within 10, 25, 50, 100, or 200 nucleotides of a target region (e.g., the CCAAT box target region, 13 nt target region, proximal HBG1/2 promoter target sequence, and/or the GATA1 binding motif in BCL11Ae). In certain embodiments, the dead guide RNA is not configured to recruit an exogenous trans-acting factor to a target region. In certain embodiments, the dgRNA is configured such that it does not provide a DNA cleavage event when complexed with an RNA-guided nuclease. Skilled artisans will appreciate that dead guide RNA molecules may be designed to comprise targeting domains complementary to regions proximal to or within a target region in a target nucleic acid. In certain embodiments, dead guide RNAs comprise targeting domain sequences that are complementary to the transcription strand or non-transcription strand of double stranded DNA. The dgRNAs herein may include modifications at the 5′ and 3′ end of the dgRNA as described for guide RNAs in the section “gRNA modifications” herein. For example, in certain embodiments, dead guide RNAs may include an anti-reverse cap analog (ARCA) at the 5′ end of the RNA. In certain embodiments, dgRNAs may include a polyA tail at the 3′ end.

[0314] In certain embodiments, the use of a dead guide RNA with the genome editing systems and methods disclosed herein may increase the total editing level of an active guide RNA. In certain embodiments, the use of a dead guide RNA with the genome editing systems disclosed herein and methods thereof may increase the frequency of deletions. In certain embodiments, the deletions may extend from the cut site of the active guide RNA toward the dead guide RNA binding site. In this way the dead guide RNA can change the directionality of an active guide RNA and orient editing toward a desired target region.

[0315] As used herein, the terms “dead gRNA” and “truncated gRNA” are used interchangeably.

### RNA-Guided Nucleases

[0316] RNA-guided nucleases according to the present disclosure include, but are not limited to, naturally-occurring Class 2 CRISPR nucleases such as Cas9, and Cpf1, as well as other nucleases derived or obtained therefrom. It has also been shown that certain RNA-guided nucleases, such as Cas9, also have helicase activity that enables them to unwind nucleic acid. In certain embodiments, the RNA-guided helicases according to the present disclosure may be any of the RNA-nucleases described herein and supra in the section entitled “RNA-guided nucleases.” In certain embodiments, the RNA-guided nuclease is not configured to recruit an exogenous trans-acting factor to a target region. In certain embodiments, an RNA-guided helicase may be an RNA-guided nuclease configured to lack nuclease activity. For example, in certain embodiments, an RNA-guided helicase may be a catalytically inactive RNA-guided nuclease that lacks nuclease activity, but still retains its helicase activity. In certain embodiments, an RNA-guided nuclease may be mutated to abolish its nuclease activity (e.g., dead Cas9), creating a catalytically inactive RNA-guided nuclease that is unable to cleave nucleic acid, but which can still unwind DNA. In certain embodiments, an RNA-guided helicase may be complexed with any of the dead guide RNAs as described herein. For example, a catalytically active RNA-guided helicase (e.g., Cas9 or Cpf1) may form an RNP complex with a dead guide RNA, resulting in a catalytically inactive dead RNP (dRNP). In certain embodiments, a catalytically inactive RNA-guided helicase (e.g., dead Cas9) and a dead guide RNA may form a dRNP. These dRNPs, although incapable of providing a cleavage event, still retain their helicase activity that is important for unwinding nucleic acid.

[0317] In functional terms, RNA-guided nucleases are defined as those nucleases that: (a) interact with (e.g. complex with) a gRNA; and (b) together with the gRNA, associate with, and optionally cleave or modify, a target region of a DNA that includes (i) a sequence complementary to the targeting domain of the gRNA and, optionally, (ii) an additional sequence referred to as a “protospacer adjacent motif,” or “PAM,” which is described in greater detail below. As the following examples will illustrate, RNA-guided nucleases can be defined, in broad terms, by their PAM specificity and cleavage activity, even though variations may exist between individual RNA-guided nucleases that share the same PAM specificity or cleavage activity. Skilled artisans will appreciate that some aspects of the present disclosure relate to systems, methods and compositions that can be implemented using any suitable RNA-guided nuclease having a certain PAM specificity and/or cleavage activity. For this reason, unless otherwise specified, the term RNA-guided nuclease should be understood as a generic term, and not limited to any particular type (e.g. Cas9 vs. Cpf1), species (e.g. S. pyogenes vs. S. aureus) or variation (e.g. full-length vs. truncated or split; naturally-occurring PAM specificity vs. engineered PAM specificity, etc.) of RNA-guided nuclease.

[0318] Various RNA-guided nucleases may require different sequential relationships between PAMs and protospacers. In general, Cas9s recognize PAM sequences that are 3′ of the protospacer. Cpf1, on the other hand, generally recognizes PAM sequences that are 5′ of the protospacer.

[0319] In addition to recognizing specific sequential orientations of PAMs and protospacers, RNA-guided nucleases can also recognize specific PAM sequences. S. aureus Cas9, for instance, recognizes a PAM sequence of NNGRRT or NNGRRV, wherein the N residues are immediately 3′ of the region recognized by the gRNA targeting domain. S. pyogenes Cas9 recognizes NGG PAM sequences. And F. novicida Cpf1 recognizes a TTN PAM sequence. PAM sequences have been identified for a variety of RNA-guided nucleases, and a strategy for identifying novel PAM sequences has been described by Shmakov 2015. It should also be noted that engineered RNA-guided nucleases can have PAM specificities that differ from the PAM specificities of reference molecules (for instance, in the case of an engineered RNA-guided nuclease, the reference molecule may be the naturally occurring variant from which the RNA-guided nuclease is derived, or the naturally occurring variant having the greatest amino acid sequence homology to the engineered RNA-guided nuclease). Examples of PAMs that may be used according to the embodiments herein include, without limitation, the sequences set forth in SEQ ID NOs:199-205.

[0320] In addition to their PAM specificity, RNA-guided nucleases can be characterized by their DNA cleavage activity: naturally-occurring RNA-guided nucleases typically form DSBs in target nucleic acids, but engineered variants have been produced that generate only SSBs (discussed above and in Ran & Hsu 2013, incorporated by reference herein), or that do not cut at all.

[0321] Cas9

[0322] Crystal structures have been determined for S. pyogenes Cas9 (Jinek 2014), and for S. aureus Cas9 in complex with a unimolecular guide RNA and a target DNA (Nishimasu 2014; Anders 2014; and Nishimasu 2015).

[0323] A naturally occurring Cas9 protein comprises two lobes: a recognition (REC) lobe and a nuclease (NUC) lobe; each of which comprise particular structural and/or functional domains. The REC lobe comprises an arginine-rich bridge helix (BH) domain, and at least one REC domain (e.g. a REC1 domain and, optionally, a REC2 domain). The REC lobe does not share structural similarity with other known proteins, indicating that it is a unique functional domain. While not wishing to be bound by any theory, mutational analyses suggest specific functional roles for the BH and REC domains: the BH domain appears to play a role in gRNA:DNA recognition, while the REC domain is thought to interact with the repeat:anti-repeat duplex of the gRNA and to mediate the formation of the Cas9/gRNA complex.

[0324] The NUC lobe comprises a RuvC domain, an HNH domain, and a PAM-interacting (PI) domain. The RuvC domain shares structural similarity to retroviral integrase superfamily members and cleaves the non-complementary (i.e. bottom) strand of the target nucleic acid. It may be formed from two or more split RuvC motifs (such as RuvC I, RuvCII, and RuvCIII in S. pyogenes and S. aureus). The HNH domain, meanwhile, is structurally similar to HNN endonuclease motifs, and cleaves the complementary (i.e. top) strand of the target nucleic acid. The PI domain, as its name suggests, contributes to PAM specificity. Examples of polypeptide sequences encoding Cas9 RuvC-like and Cas9 HNH-like domains that may be used according to the embodiments herein are set forth in SEQ ID NOs:15-23, 52-123 (RuvC-like domains) and SEQ ID NOs:24-28, 124-198 (HNH-like domains).

[0325] While certain functions of Cas9 are linked to (but not necessarily fully determined by) the specific domains set forth above, these and other functions may be mediated or influenced by other Cas9 domains, or by multiple domains on either lobe. For instance, in S. pyogenes Cas9, as described in Nishimasu 2014, the repeat:antirepeat duplex of the gRNA falls into a groove between the REC and NUC lobes, and nucleotides in the duplex interact with amino acids in the BH, PI, and REC domains. Some nucleotides in the first stem loop structure also interact with amino acids in multiple domains (PI, BH and REC1), as do some nucleotides in the second and third stem loops (RuvC and PI domains). Examples of polypeptide sequences encoding Cas9 molecules that may be used according to the embodiments herein are set forth in SEQ ID NOs:1-2, 4-6, 12, and 14.

[0326] Cpf1

[0327] The crystal structure of Acidaminococcus sp. Cpf1 in complex with crRNA and a double-stranded (ds) DNA target including a TTTN PAM sequence has been solved by Yamano 2016 (incorporated by reference herein). Cpf1, like Cas9, has two lobes: a REC (recognition) lobe, and a NUC (nuclease) lobe. The REC lobe includes REC1 and REC2 domains, which lack similarity to any known protein structures. The NUC lobe, meanwhile, includes three RuvC domains (RuvC-I, -II and -III) and a BH domain. However, in contrast to Cas9, the Cpf1 REC lobe lacks an HNH domain, and includes other domains that also lack similarity to known protein structures: a structurally unique PI domain, three Wedge (WED) domains (WED-I, -II and -III), and a nuclease (Nuc) domain.

[0328] While Cas9 and Cpf1 share similarities in structure and function, it should be appreciated that certain Cpf1 activities are mediated by structural domains that are not analogous to any Cas9 domains. For instance, cleavage of the complementary strand of the target DNA appears to be mediated by the Nuc domain, which differs sequentially and spatially from the HNH domain of Cas9. Additionally, the non-targeting portion of Cpf1 gRNA (the handle) adopts a pseudoknot structure, rather than a stem loop structure formed by the repeat:antirepeat duplex in Cas9 gRNAs.

[0329] In certain embodiments, a Cpf1 protein may be a modified Cpf1 protein. In certain embodiments, a modified Cpf1 protein may include one or more modifications. In certain embodiments the modifications may be, without limitation, one or more mutations in a Cpf1 nucleotide sequence or Cpf1 amino acid sequence, one or more additional sequences such as a His tag or a nuclear localization signal (NLS), or a combination thereof. In certain embodiments, a modified Cpf1 may also be referred to herein as a Cpf1 variant.

[0330] In certain embodiments, the Cpf1 protein may be derived from a Cpf1 protein selected from the group consisting of Acidaminococcus sp. strain BV3L6 Cpf1 protein (AsCpf1), Lachnospiraceae bacterium ND2006 Cpf1 protein (LbCpf1), and Lachnospiraceae bacterium MA2020 (Lb2Cpf1). In certain embodiments, the Cpf1 protein may comprise a sequence selected from the group consisting of SEQ ID NOs. 1016-1018, having the codon-optimized nucleic acid sequences of SEQ ID NOs. 1019-1021, respectively.

[0331] In certain embodiments, the modified Cpf1 protein may comprise a nuclear localization signal (NLS). For example, but not by way of limitation, NLS sequences useful in connection with the methods and compositions disclosed herein will comprise an amino acid sequence capable of facilitating protein import into the cell nucleus. NLS sequences useful in connection with the methods and compositions disclosed herein are known in the art. Examples of such NLS sequences include the nucleoplasmin NLS having the amino acid sequence: KRPAATKKAGQAKKKK (SEQ ID NO. 1006) and the simian virus 40 “SV40” NLS having the amino acid sequence PKKKRKV (SEQ ID NO. 1007).

[0332] In certain embodiments, the NLS sequence of the modified Cpf1 protein is positioned at or near the C-terminus of the Cpf1 protein sequence. For example, but not by way of limitation, the modified Cpf1 protein can be selected from the following: His-AsCpf1-nNLS (SEQ ID NO. 1000); His-AsCpf1-sNLS (SEQ ID NO. 1008) and His-AsCpf1-sNLS-sNLS (SEQ ID NO. 1001), where “His” refers to a six-histidine purification sequence, “AsCpf1” refers to the Acidaminococcus sp. Cpf1 protein sequence, “nNLS” refers to the nucleoplasmin NLS, and “sNLS” refers to the SV40 NLS. Additional permutations of the identity and C-terminal positions of NLS sequences, e.g., appending two or more nNLS sequences or combinations of nNLS and sNLS sequences (or other NLS sequences), as well as sequences with and without purification sequences, e.g., six-histidine sequences, are within the scope of the instantly disclosed subject matter.

[0333] In certain embodiments, the NLS sequence of the modified Cpf1 protein may be positioned at or near the N-terminus of the Cpf1 protein sequence. For example, but not by way of limitation, the modified Cpf1 protein may be selected from the following: His-sNLS-AsCpf1 (SEQ ID NO. 1009), His-sNLS-sNLS-AsCpf1 (SEQ ID NO. 1010), and sNLS-sNLS-AsCpf1 (SEQ ID NO. 1011). Additional permutations of the identity and N-terminal positions of NLS sequences, e.g., appending two or more nNLS sequences or combinations of nNLS and sNLS sequences (or other NLS sequences), as well as sequences with and without purification sequences, e.g., six-histidine sequences, are within the scope of the instantly disclosed subject matter.

[0334] In certain embodiments, the modified Cpf1 protein may comprise NLS sequences positioned at or near both the N-terminus and C-terminus of the Cpf1 protein sequence. For example, but not by way of limitation, the modified Cpf1 protein may be selected from the following: His-sNLS-AsCpf1-sNLS (SEQ ID NO. 1012) and His-sNLS-sNLS-AsCpf1-sNLS-sNLS (SEQ ID NO. 1013). Additional permutations of the identity and N-terminal/C-terminal positions of NLS sequences, e.g., appending two or more nNLS sequences or combinations of nNLS and sNLS sequences (or other NLS sequences) to either the N-terminal/C-terminal positions, as well as sequences with and without purification sequences, e.g., six-histidine sequences, are within the scope of the instantly disclosed subject matter.

[0335] In certain embodiments, the modified Cpf1 protein may comprise an alteration (e.g., a deletion or substitution) at one or more cysteine residues of the Cpf1 protein sequence. For example, but not by way of limitation, modified Cpf1 protein may comprise an alteration at a position selected from the group consisting of: C65, C205, C334, C379, C608, C674, C1025, and C1248. In certain embodiments, the modified Cpf1 protein may comprise a substitution of one or more cysteine residues for a serine or alanine. In certain embodiments, the modified Cpf1 protein may comprise an alteration selected from the group consisting of: C65S, C205S, C334S, C379S, C608S, C674S, C1025S, and C1248S. In certain embodiments, the modified Cpf1 protein may comprise an alteration selected from the group consisting of: C65A, C205A, C334A, C379A, C608A, C674A, C1025A, and C1248A. In certain embodiments, the modified Cpf1 protein may comprise alterations at positions C334 and C674 or C334, C379, and C674. In certain embodiments, the modified Cpf1 protein may comprise the following alterations: C334S and C674S, or C334S, C379S, and C674S. In certain embodiments, the modified Cpf1 protein may comprise the following alterations: C334A and C674A, or C334A, C379A, and C674A. In certain embodiments, the modified Cpf1 protein may comprise both one or more cysteine residue alteration as well as the introduction of one or more NLS sequences, e.g., His-AsCpf1-nNLS Cys-less (SEQ ID NO. 1014) or His-AsCpf1-nNLS Cys-low (SEQ ID NO. 1015). In various embodiments, the Cpf1 protein comprising a deletion or substitution in one or more cysteine residues exhibits reduced aggregation.

[0336] In certain embodiments, other modified Cpf1 proteins known in the art may be used with the methods and systems described herein. For example, in certain embodiments, the modified Cpf1 may be Cpf1 containing the mutation S542R/K548V/N552R (“Cpf1 RVR”). Cpf1 RVR has been shown to cleave target sites with a TATV PAM. In certain embodiments, the modified Cpf1 may be Cpf1 containing the mutation S542R/K607R (“Cpf1 RR”). Cpf1 RR has been shown to cleave target sites with a TYCV/CCCC PAM.

[0337] In some embodiments, a Cpf1 variant is used herein, wherein the Cpf1 variant comprises mutations at one or more residues of AsCpf1 (Acidaminococcus sp. BV3L6) selected from the group consisting of 11, 12, 13, 14, 15, 16, 17, 34, 36, 39, 40, 43, 46, 47, 50, 54, 57, 58, 111, 126, 127, 128, 129, 130, 131, 132, 133, 134, 135, 136, 157, 158, 159, 160, 161, 162, 163, 164, 165, 166, 167, 168, 169, 170, 171, 172, 173, 174, 175, 176, 177, 178, 532, 533, 534, 535, 536, 537, 538, 539, 540, 541, 542, 543, 544, 545, 546, 547, 548, 549, 550, 551, 552, 553, 554, 555, 556, 565, 566, 567, 568, 569, 570, 571, 572, 573, 574, 575, 592, 593, 594, 595, 596, 597, 598, 599, 600, 601, 602, 603, 604, 605, 606, 607, 608, 609, 610, 611, 612, 613, 614, 615, 616, 617, 618, 619, 620, 626, 627, 628, 629, 630, 631, 632, 633, 634, 635, 636, 637, 638, 642, 643, 644, 645, 646, 647, 648, 649, 651, 652, 653, 654, 655, 656, 676, 679, 680, 682, 683, 684, 685, 686, 687, 688, 689, 690, 691, 692, 693, 707, 711, 714, 715, 716, 717, 718, 719, 720, 721, 722, 739, 765, 768, 769, 773, 777, 778, 779, 780, 781, 782, 783, 784, 785, 786, 870, 871, 872, 873, 874, 875, 876, 877, 878, 879, 880, 881, 882, 883, 884, or 1048 or the corresponding position of an AsCpf1 orthologue, homologue, or variant.

[0338] In certain embodiments, a Cpf1 variant as used herein may include any of the Cpf1 proteins described in International Publication Number WO 2017/184768 A1 by Zhang et al. (“'768 Publication”), which is incorporated by reference herein.

[0339] In certain embodiments, a modified Cpf1 protein (also referred to as a Cpf1 variant) used herein may be encoded by any of the sequences set forth in SEQ ID NOs:1000, 1001, 1008-1018, 1032, 1035-39, 1094-1097, 1107-09 (Cpf1 polypeptide sequences) or SEQ ID NOs:1019-1021, 1110-17 (Cpf1 polynucleotide sequences). Table 20 sets forth exemplary Cpf1 variant amino acid and nucleotide sequences. These sequences are set forth in FIG. 62, which details the positions of six-histidine sequences (underlined letters) and NLS sequences (bolded letters). Additional permutations of the identity and N-terminal/C-terminal positions of NLS sequences, e.g., appending two or more nNLS sequences or combinations of nNLS and sNLS sequences (or other NLS sequences) to either the N-terminal/C-terminal positions, as well as sequences with and without purification sequences, e.g., six-histidine sequences, are within the scope of the instantly disclosed subject matter.

[0340] In certain embodiments, any of the Cpf1 proteins or modified Cpf1 proteins disclosed herein may be complexed with one or more gRNA comprising the targeting domain set forth in SEQ ID NOs 1002 and/or 1004 to alter a CCAAT box target region. In certain embodiments, any of the Cpf1 proteins or modified Cpf1 proteins disclosed herein may be complexed with one or more gRNA comprising a sequence set forth in Table 18 or Table 19. In certain embodiments, the modified Cpf1 protein may be His-AsCpf1-nNLS (SEQ ID NO: 1000) or His-AsCpf1-sNLS-sNLS (SEQ ID NO:1001). In certain embodiments, a modified Cpf1 protein used herein may be encoded by any of the sequences set forth in SEQ ID NOs:1000, 1001, 1008-1018, 1032, 1035-39, 1094-1097, 1107-09 (Cpf1 polypeptide sequences) or SEQ ID NOs:1019-1021, 1110-17 (Cpf1 polynucleotide sequences). In certain embodiments, the modified Cpf1 protein may comprise the sequence set forth in SEQ ID NO:1097.

[0341] Modifications of RNA-Guided Nucleases

[0342] The RNA-guided nucleases described above have activities and properties that can be useful in a variety of applications, but the skilled artisan will appreciate that RNA-guided nucleases can also be modified in certain instances, to alter cleavage activity, PAM specificity, or other structural or functional features.

[0343] Turning first to modifications that alter cleavage activity, mutations that reduce or eliminate the activity of domains within the NUC lobe have been described above. Exemplary mutations that may be made in the RuvC domains, in the Cas9 HNH domain, or in the Cpf1 Nuc domain are described in Ran & Hsu 2013 and Yamano 2016, as well as in Cotta-Ramusino. In general, mutations that reduce or eliminate activity in one of the two nuclease domains result in RNA-guided nucleases with nickase activity, but it should be noted that the type of nickase activity varies depending on which domain is inactivated. As one example, inactivation of a RuvC domain of a Cas9 will result in a nickase that cleaves the complementary or top strand as shown below (where C denotes the site of cleavage).

[0344] On the other hand, inactivation of a Cas9 HNH domain results in a nickase that cleaves the bottom or non-complementary strand.

[0345] Modifications of PAM specificity relative to naturally occurring Cas9 reference molecules has been described by Kleinstiver et al. for both S. pyogenes (Kleinstiver 2015a) and S. aureus (Kleinstiver 2015b). Kleinstiver et al. have also described modifications that improve the targeting fidelity of Cas9 (Kleinstiver 2016). Each of these references is incorporated by reference herein.

[0346] RNA-guided nucleases have been split into two or more parts, as described by Zetsche 2015 and Fine 2015 (both incorporated by reference herein).

[0347] RNA-guided nucleases can be, in certain embodiments, size-optimized or truncated, for instance via one or more deletions that reduce the size of the nuclease while still retaining gRNA association, target and PAM recognition, and cleavage activities. In certain embodiments, RNA guided nucleases are bound, covalently or non-covalently, to another polypeptide, nucleotide, or other structure, optionally by means of a linker. Exemplary bound nucleases and linkers are described by Guilinger 2014, incorporated by reference herein for all purposes.

[0348] RNA-guided nucleases also optionally include a tag, such as, but not limited to, a nuclear localization signal to facilitate movement of RNA-guided nuclease protein into the nucleus. In certain embodiments, the RNA-guided nuclease can incorporate C- and/or N-terminal nuclear localization signals. Nuclear localization sequences are known in the art and are described in Maeder and elsewhere.

[0349] The foregoing list of modifications is intended to be exemplary in nature, and the skilled artisan will appreciate, in view of the instant disclosure, that other modifications may be possible or desirable in certain applications. For brevity, therefore, exemplary systems, methods and compositions of the present disclosure are presented with reference to particular RNA-guided nucleases, but it should be understood that the RNA-guided nucleases used may be modified in ways that do not alter their operating principles. Such modifications are within the scope of the present disclosure.

### Nucleic Acids Encoding RNA-Guided Nucleases

[0350] Nucleic acids encoding RNA-guided nucleases, e.g., Cas9, Cpf1 or functional fragments thereof, are provided herein. Examples of nucleic acid sequences encoding Cas9 molecules that may be used according to the embodiments herein are set forth in SEQ ID NOs:3, 7-11, 13. Exemplary nucleic acids encoding RNA-guided nucleases have been described previously (see, e.g., Cong 2013; Wang 2013; Mali 2013; Jinek 2012).

[0351] In some cases, a nucleic acid encoding an RNA-guided nuclease can be a synthetic nucleic acid sequence. For example, the synthetic nucleic acid molecule can be chemically modified. In certain embodiments, an mRNA encoding an RNA-guided nuclease will have one or more (e.g., all) of the following properties: it can be capped; polyadenylated; and substituted with 5-methylcytidine and/or pseudouridine.

[0352] Synthetic nucleic acid sequences can also be codon optimized, e.g., at least one non-common codon or less-common codon has been replaced by a common codon. For example, the synthetic nucleic acid can direct the synthesis of an optimized messenger mRNA, e.g., optimized for expression in a mammalian expression system, e.g., described herein. Examples of codon optimized Cas9 coding sequences are presented in Cotta-Ramusino.

[0353] In addition, or alternatively, a nucleic acid encoding an RNA-guided nuclease may comprise a nuclear localization sequence (NLS). Nuclear localization sequences are known in the art.

### Functional Analysis of Candidate Molecules

[0354] Candidate RNA-guided nucleases, gRNAs, and complexes thereof, can be evaluated by standard methods known in the art. See, e.g. Cotta-Ramusino. The stability of RNP complexes may be evaluated by differential scanning fluorimetry, as described below.

[0355] Differential Scanning Fluorimetry (DSF)

[0356] The thermostability of ribonucleoprotein (RNP) complexes comprising gRNAs and RNA-guided nucleases can be measured via DSF. The DSF technique measures the thermostability of a protein, which can increase under favorable conditions such as the addition of a binding RNA molecule, e.g., a gRNA.

[0357] A DSF assay can be performed according to any suitable protocol, and can be employed in any suitable setting, including without limitation (a) testing different conditions (e.g. different stoichiometric ratios of gRNA: RNA-guided nuclease protein, different buffer solutions, etc.) to identify optimal conditions for RNP formation; and (b) testing modifications (e.g. chemical modifications, alterations of sequence, etc.) of an RNA-guided nuclease and/or a gRNA to identify those modifications that improve RNP formation or stability. One readout of a DSF assay is a shift in melting temperature of the RNP complex; a relatively high shift suggests that the RNP complex is more stable (and may thus have greater activity or more favorable kinetics of formation, kinetics of degradation, or another functional characteristic) relative to a reference RNP complex characterized by a lower shift. When the DSF assay is deployed as a screening tool, a threshold melting temperature shift may be specified, so that the output is one or more RNPs having a melting temperature shift at or above the threshold. For instance, the threshold can be 5-10° C. (e.g. 5°, 6°, 7° 8°, 9°, 10°) or more, and the output may be one or more RNPs characterized by a melting temperature shift greater than or equal to the threshold.

[0358] Two non-limiting examples of DSF assay conditions are set forth below:

[0359] To determine the best solution to form RNP complexes, a fixed concentration (e.g. 2 μM) of Cas9 in water+10×SYPRO Orange® (Life Technologies cat #S-6650) is dispensed into a 384 well plate. An equimolar amount of gRNA diluted in solutions with varied pH and salt is then added. After incubating at room temperature for 10′ and brief centrifugation to remove any bubbles, a Bio-Rad CFX384™ Real-Time System C1000 Touch™ Thermal Cycler with the Bio-Rad CFX Manager software is used to run a gradient from 20° C. to 90° C. with a 1° C. increase in temperature every 10 seconds.

[0360] The second assay consists of mixing various concentrations of gRNA with fixed concentration (e.g. 2 μM) Cas9 in optimal buffer from assay 1 above and incubating (e.g. at RT for 10′) in a 384 well plate. An equal volume of optimal buffer+10×SYPRO Orange® (Life Technologies cat #S-6650) is added and the plate sealed with Microseal® B adhesive (MSB-1001). Following brief centrifugation to remove any bubbles, a Bio-Rad CFX384™ Real-Time System C1000 Touch™ Thermal Cycler with the Bio-Rad CFX Manager software is used to run a gradient from 20° C. to 90° C. with a 1° C. increase in temperature every 10 seconds.

### Genome Editing Strategies

[0361] The genome editing systems described above are used, in various embodiments of the present disclosure, to generate edits in (i.e. to alter) targeted regions of DNA within or obtained from a cell. Various strategies are described herein to generate particular edits, and these strategies are generally described in terms of the desired repair outcome, the number and positioning of individual edits (e.g. SSBs or DSBs), and the target sites of such edits.

[0362] Genome editing strategies that involve the formation of SSBs or DSBs are characterized by repair outcomes including: (a) deletion of all or part of a targeted region; (b) insertion into or replacement of all or part of a targeted region; or (c) interruption of all or part of a targeted region. This grouping is not intended to be limiting, or to be binding to any particular theory or model, and is offered solely for economy of presentation. Skilled artisans will appreciate that the listed outcomes are not mutually exclusive and that some repairs may result in other outcomes. The description of a particular editing strategy or method should not be understood to require a particular repair outcome unless otherwise specified.

[0363] Replacement of a targeted region generally involves the replacement of all or part of the existing sequence within the targeted region with a homologous sequence, for instance through gene correction or gene conversion, two repair outcomes that are mediated by HDR pathways. HDR is promoted by the use of a donor template, which can be single-stranded or double stranded, as described in greater detail below. Single or double stranded templates can be exogenous, in which case they will promote gene correction, or they can be endogenous (e.g. a homologous sequence within the cellular genome), to promote gene conversion. Exogenous templates can have asymmetric overhangs (i.e. the portion of the template that is complementary to the site of the DSB may be offset in a 3′ or 5′ direction, rather than being centered within the donor template), for instance as described by Richardson 2016 (incorporated by reference herein). In instances where the template is single stranded, it can correspond to either the complementary (top) or non-complementary (bottom) strand of the targeted region.

[0364] Gene conversion and gene correction are facilitated, in some cases, by the formation of one or more nicks in or around the targeted region, as described in Ran & Hsu 2013 and Cotta-Ramusino. In some cases, a dual-nickase strategy is used to form two offset SSBs that, in turn, form a single DSB having an overhang (e.g. a 5′ overhang).

[0365] Interruption and/or deletion of all or part of a targeted sequence can be achieved by a variety of repair outcomes. As one example, a sequence can be deleted by simultaneously generating two or more DSBs that flank a targeted region, which is then excised when the DSBs are repaired, as is described in Maeder for the LCA10 mutation. As another example, a sequence can be interrupted by a deletion generated by formation of a double strand break with single-stranded overhangs, followed by exonucleolytic processing of the overhangs prior to repair.

[0366] One specific subset of target sequence interruptions is mediated by the formation of an indel within the targeted sequence, where the repair outcome is typically mediated by NHEJ pathways (including Alt-NHEJ). NHEJ is referred to as an “error prone” repair pathway because of its association with indel mutations. In some cases, however, a DSB is repaired by NHEJ without alteration of the sequence around it (a so-called “perfect” or “scarless” repair); this generally requires the two ends of the DSB to be perfectly ligated. Indels, meanwhile, are thought to arise from enzymatic processing of free DNA ends before they are ligated that adds and/or removes nucleotides from either or both strands of either or both free ends.

[0367] Because the enzymatic processing of free DSB ends may be stochastic in nature, indel mutations tend to be variable, occurring along a distribution, and can be influenced by a variety of factors, including the specific target site, the cell type used, the genome editing strategy used, etc. Even so, it is possible to draw limited generalizations about indel formation: deletions formed by repair of a single DSB are most commonly in the 1-50 bp range, but can reach greater than 100-200 bp. Insertions formed by repair of a single DSB tend to be shorter and often include short duplications of the sequence immediately surrounding the break site. However, it is possible to obtain large insertions, and in these cases, the inserted sequence has often been traced to other regions of the genome or to plasmid DNA present in the cells.

[0368] Indel mutations—and genome editing systems configured to produce indels—are useful for interrupting target sequences, for example, when the generation of a specific final sequence is not required and/or where a frameshift mutation would be tolerated. They can also be useful in settings where particular sequences are preferred, insofar as the certain sequences desired tend to occur preferentially from the repair of an SSB or DSB at a given site. Indel mutations are also a useful tool for evaluating or screening the activity of particular genome editing systems and their components. In these and other settings, indels can be characterized by (a) their relative and absolute frequencies in the genomes of cells contacted with genome editing systems and (b) the distribution of numerical differences relative to the unedited sequence, e.g. ±1, ±2, ±3, etc. As one example, in a lead-finding setting, multiple gRNAs can be screened to identify those gRNAs that most efficiently drive cutting at a target site based on an indel readout under controlled conditions. Guides that produce indels at or above a threshold frequency, or that produce a particular distribution of indels, can be selected for further study and development. Indel frequency and distribution can also be useful as a readout for evaluating different genome editing system implementations or formulations and delivery methods, for instance by keeping the gRNA constant and varying certain other reaction conditions or delivery methods.

[0369] Multiplex Strategies

[0370] Genome editing systems according to this disclosure may also be employed for multiplex gene editing to generate two or more DSBs, either in the same locus or in different loci. Any of the RNA-guided nucleases and gRNAs disclosed herein may be used in genome editing systems for multiplex gene editing. Strategies for editing that involve the formation of multiple DSBs, or SSBs, are described in, for instance, Cotta-Ramusino.

[0371] As disclosed herein, multiple gRNAs may be used in genome editing systems to introduce alterations (e.g., deletions, insertions) into the 13 nt target region of HBG1 and/or HBG2. In certain embodiments, one or more gRNAs comprising a targeting domain set forth in SEQ ID NOs:251-901, 940-942 may be used to introduce alterations in the 13 nt target region of HBG1 and/or HBG2. In other embodiments, multiple gRNAs may be used in genome editing systems to introduce alterations into the CCAAT box target region. In certain embodiments, one or more gRNAs comprising a sequence set forth in SEQ ID NOs:970, 971, 996, 997 may be used to introduce alterations in the CCAAT box target region. In certain embodiments, one or more gRNAs comprising a targeting domain set forth in SEQ ID NOs:1002, 1004 may be used to introduce alterations in the CCAAT box target region. In other embodiments, multiple gRNAs may be used in genome editing systems to introduce alterations into the GATA1 binding motif in BCL11Ae. In certain embodiments, one or more gRNAs comprising a targeting domain set forth in SEQ ID NOs:952-955 may be used to introduce alterations in the GATA1 binding motif in BCL11Ae. Multiple gRNAs may also be used in genome editing systems to introduce alterations into the GATA1 binding motif in BCL11Ae, the CCAAT box target region, the 13 nt target region of HBG1 and/or HBG2, or a combination thereof. In certain embodiments, one or more gRNAs comprising a targeting domain set forth in SEQ ID NOs:952-955 may be used to introduce alterations in the GATA1 binding motif in BCL11Ae and one or more gRNAs comprising a targeting domain set forth in SEQ ID NOs:251-901, 940-942 may be used to introduce alterations in the 13 nt target region of HBG1 and/or HBG2. In certain embodiments, one or more gRNAs comprising a targeting domain set forth in SEQ ID NOs:952-955 may be used to introduce alterations in the GATA1 binding motif in BCL11Ae and one or more gRNAs or gRNAs comprising a targeting domain set forth in SEQ ID NOs:970, 971, 996, 997 may be used to introduce alterations in the CCAAT box target region. In certain embodiments, one or more gRNAs comprising a targeting domain set forth in SEQ ID NOs:952-955 may be used to introduce alterations in the GATA1 binding motif in BCL11Ae and one or more gRNAs comprising a targeting domain set forth in SEQ ID NOs:1002, 1004 may be used to introduce alterations in the CCAAT box target region.

[0372] In certain embodiments, multiple gRNAs and an RNA-guided nuclease may be used in genome editing systems to introduce alterations (e.g., deletions, insertions) into the CCAAT box target region of HBG1 and/or HBG2. In certain embodiments, the RNA-guided nuclease may be a Cas9, modified Cas9 (e.g., D10A), Cpf1, or modified Cpf1.

[0373] Donor Template Design

[0374] Donor template design is described in detail in the literature, for instance in Cotta-Ramusino. DNA oligomer donor templates (oligodeoxynucleotides or ODNs), which can be single stranded (ssODNs) or double-stranded (dsODNs), can be used to facilitate HDR-based repair of DSBs or to boost overall editing rate, and are particularly useful for introducing alterations into a target DNA sequence, inserting a new sequence into the target sequence, or replacing the target sequence altogether.

[0375] Whether single-stranded or double stranded, donor templates generally include regions that are homologous to regions of DNA within or near (e.g. flanking or adjoining) a target sequence to be cleaved. These homologous regions are referred to here as “homology arms,” and are illustrated schematically below:

[5′ homology arm]-[replacement sequence]-[3′ homology arm].

[0376] The homology arms can have any suitable length (including 0 nucleotides if only one homology arm is used), and 3′ and 5′ homology arms can have the same length, or can differ in length. The selection of appropriate homology arm lengths can be influenced by a variety of factors, such as the desire to avoid homologies or microhomologies with certain sequences such as Alu repeats or other very common elements. For example, a 5′ homology arm can be shortened to avoid a sequence repeat element. In other embodiments, a 3′ homology arm can be shortened to avoid a sequence repeat element. In some embodiments, both the 5′ and the 3′ homology arms can be shortened to avoid including certain sequence repeat elements. In addition, some homology arm designs can improve the efficiency of editing or increase the frequency of a desired repair outcome. For example, Richardson 2016, which is incorporated by reference herein, found that the relative asymmetry of 3′ and 5′ homology arms of single stranded donor templates influenced repair rates and/or outcomes.

[0377] Replacement sequences in donor templates have been described elsewhere, including in Cotta-Ramusino. A replacement sequence can be any suitable length (including zero nucleotides, where the desired repair outcome is a deletion), and typically includes one, two, three or more sequence modifications relative to the naturally-occurring sequence within a cell in which editing is desired. One common sequence modification involves the alteration of the naturally-occurring sequence to repair a mutation that is related to a disease or condition of which treatment is desired. Another common sequence modification involves the alteration of one or more sequences that are complementary to, or then, the PAM sequence of the RNA-guided nuclease or the targeting domain of the gRNA(s) being used to generate an SSB or DSB, to reduce or eliminate repeated cleavage of the target site after the replacement sequence has been incorporated into the target site.

[0378] Where a linear ssODN is used, it can be configured to (i) anneal to the nicked strand of the target nucleic acid, (ii) anneal to the intact strand of the target nucleic acid, (iii) anneal to the plus strand of the target nucleic acid, and/or (iv) anneal to the minus strand of the target nucleic acid. An ssODN may have any suitable length, e.g., about, at least, or no more than 80-200 nucleotides (e.g., 80, 90, 100, 110, 120, 130, 140, 150, 160, 170, 180, 190, or 200 nucleotides).

[0379] It should be noted that a template nucleic acid can also be a nucleic acid vector, such as a viral genome or circular double stranded DNA, e.g., a plasmid. Nucleic acid vectors comprising donor templates can include other coding or non-coding elements. For example, a template nucleic acid can be delivered as part of a viral genome (e.g. in an AAV or lentiviral genome) that includes certain genomic backbone elements (e.g. inverted terminal repeats, in the case of an AAV genome) and optionally includes additional sequences coding for a gRNA and/or an RNA-guided nuclease. In certain embodiments, the donor template can be adjacent to, or flanked by, target sites recognized by one or more gRNAs, to facilitate the formation of free DSBs on one or both ends of the donor template that can participate in repair of corresponding SSBs or DSBs formed in cellular DNA using the same gRNAs. Exemplary nucleic acid vectors suitable for use as donor templates are described in Cotta-Ramusino, which is incorporated by reference.

[0380] Whatever format is used, a template nucleic acid can be designed to avoid undesirable sequences. In certain embodiments, one or both homology arms can be shortened to avoid overlap with certain sequence repeat elements, e.g., Alu repeats, LINE elements, etc.

[0381] In certain embodiments, silent, non-pathogenic SNPs may be included in the ssODN donor template to allow for identification of a gene editing event.

[0382] In certain embodiments, a donor template may be a non-specific template that is non-homologous to regions of DNA within or near a target sequence to be cleaved. In certain embodiments, donor templates for use in targeting the GATA1 binding motif in BCL11Ae may include, without limitation, non-target specific templates that are nonhomologous to regions of DNA within or near the GATA 1 binding motif in BCL11Ae. In certain embodiments, donor templates for use in targeting the 13 nt target region may include, without limitation, non-target specific templates that are nonhomologous to regions of DNA within or near the 13 nt target region.

[0383] A donor template or template nucleic acid, as that term is used herein, refers to a nucleic acid sequence which can be used in conjunction with an RNA nuclease molecule and one or more gRNA molecules to alter (e.g., delete, disrupt, or modify) a target DNA sequence. In certain embodiments, the template nucleic acid results in an alteration (e.g., deletion) at the CCAAT box target region of HBG1 and/or HBG2. In certain embodiments, the alteration is a non-naturally occurring alteration. In certain embodiments, the non-naturally occurring alteration at the CCAAT box target region of HBG1 and/or HBG2 may comprise the 18 nt target region, the 11 nt target region, the 4 nt target region, or the 1 nt target region, or a combination thereof. In certain embodiments, the alteration is a naturally occurring alteration. In certain embodiments, the naturally occurring alteration at the CCAAT box target region of HBG1 and/or HBG2 may comprise the 13 nt target region, the c.−117 G>A target region, or a combination thereof. In certain embodiments, the template nucleic acid is an ssODN. In certain embodiments, the ssODN is a positive strand or a negative strand.

[0384] For example, a template nucleic acid for introducing the 18 nt deletion at the 18 nt target region (HBG1 c.−104 to −121, HBG2 c.−104 to −121, or a combination thereof) may comprise a 5′ homology arm, a replacement sequence, and a 3′ homology arm, where the replacement sequence is 0 nucleotides or 0 bp. In certain embodiments, the 5′ homology arm may be about 25 to about 200 nucleotides or more in length, e.g., at least about 25, 50, 75, 100, 125, 150, 175, or 200 nucleotides in length. In certain embodiments, the 5′ homology arm comprises about 50 to 100 bp, e.g., 55 to 95, 60 to 90, 70 to 90, or 80 to 90 bp, homology 5′ of the 18 nt target region. In certain embodiments, the 3′ homology arm may be about 25 to about 200 nucleotides or more in length, e.g., at least about 25, 50, 75, 100, 125, 150, 175, or 200 nucleotides in length. In certain embodiments, the 3′ homology arm comprises about 50 to 100 bp, e.g., 55 to 95, 60 to 90, 70 to 90, or 80 to 90 bp, homology 3′ of the 18 nt target region. In certain embodiments, the 5′ and 3′ homology arms are symmetrical in length. In certain embodiments, the 5′ and 3′ homology arms are asymmetrical in length. In certain embodiments, the template nucleic acid is an ssODN. In certain embodiments, the ssODN is a positive strand. In certain embodiments, the ssODN is a negative strand. In certain embodiments, the ssODN comprises, consists essentially of, or consists of SEQ ID NO:974 (OLI16409) or SEQ ID NO:975 (OLI16410).

[0385] In certain embodiments, a template nucleic acid for introducing the 11 nt deletion at the 11 nt target region (HBG1 c.−105 to −115, HBG2 c.−105 to −115, or a combination thereof) may comprise a 5′ homology arm, a replacement sequence, and a 3′ homology arm, where the replacement sequence is 0 nucleotides or 0 bp. In certain embodiments, the 5′ homology arm may be about 25 to about 200 nucleotides in length, e.g., at least about 25, 50, 75, 100, 125, 150, 175, or 200 nucleotides in length. In certain embodiments, the 5′ homology arm comprises about 50 to 100 bp, e.g., 55 to 95, 60 to 90, 70 to 90, or 80 to 90 bp, homology 5′ of the 11 nt target region. In certain embodiments, the 3′ homology arm may be about 25 to about 200 nucleotides in length, e.g., at least about 25, 50, 75, 100, 125, 150, 175, or 200 nucleotides in length. In certain embodiments, the 3′ homology arm comprises about 50 to 100 bp, e.g., 55 to 95, 60 to 90, 70 to 90, or 80 to 90 bp, homology 3′ of the 11 nt target region. In certain embodiments, the 5′ and 3′ homology arms are symmetrical in length. In certain embodiments, the 5′ and 3′ homology arms are asymmetrical in length. In certain embodiments, the template nucleic acid is an ssODN. In certain embodiments, the ssODN is a positive strand. In certain embodiments, the ssODN is a negative strand. In certain embodiments, the ssODN comprises, consists essentially of, or consists of SEQ ID NO:976 (OLI16411) or SEQ ID NO:978 (OLI16413).

[0386] In certain embodiments, a template nucleic acid for introducing the 4 nt deletion at the 4 nt target region (HBG1 c.−112 to −115, HBG2 c.−112 to −115, or a combination thereof) may comprise a 5′ homology arm, a replacement sequence, and a 3′ homology arm, where the replacement sequence is 0 nucleotides or 0 bp. In certain embodiments, the 5′ homology arm may be about 25 to about 200 nucleotides in length, e.g., at least about 25, 50, 75, 100, 125, 150, 175, or 200 nucleotides in length. In certain embodiments, the 5′ homology arm comprises about 50 to 100 bp, e.g., 55 to 95, 60 to 90, 70 to 90, or 80 to 90 bp, homology 5′ of the 4 nt target region. In certain embodiments, the 3′ homology arm may be about 25 to about 200 nucleotides in length, e.g., at least about 25, 50, 75, 100, 125, 150, 175, or 200 nucleotides in length. In certain embodiments, the 3′ homology arm comprises about 50 to 100 bp, e.g., 55 to 95, 60 to 90, 70 to 90, or 80 to 90 bp, homology 3′ of the 4 nt target region. In certain embodiments, the 5′ and 3′ homology arms are symmetrical in length. In certain embodiments, the 5′ and 3′ homology arms are asymmetrical in length. In certain embodiments, the template nucleic acid is an ssODN. In certain embodiments, the ssODN is a positive strand. In certain embodiments, the ssODN is a negative strand. In certain embodiments, the ssODN comprises, consists essentially of, or consists of SEQ ID NO:984 (OLI16419), SEQ ID NO:985 (OLI16420), SEQ ID NO:986 (OLI16421), SEQ ID NO:987 (OLI16422), SEQ ID NO:988 (OLI16423), SEQ ID NO:989 (OLI16424), SEQ ID NO:990 (OLI16425), SEQ ID NO:991 (OLI16426), SEQ ID NO:992 (OLI16427), SEQ ID NO:993 (OLI16428), SEQ ID NO:994 (OLI16429), or SEQ ID NO:995 (OLI16430).

[0387] In certain embodiments, a template nucleic acid for introducing the 1 nt deletion at the 1 nt target region (HBG1 c.−116, HBG2 c.−116, or a combination thereof) may comprise a 5′ homology arm, a replacement sequence, and a 3′ homology arm, where the replacement sequence is 0 nucleotides or 0 bp. In certain embodiments, the 5′ homology arm may be about 25 to about 200 nucleotides in length, e.g., at least about 25, 50, 75, 100, 125, 150, 175, or 200 nucleotides in length. In certain embodiments, the 5′ homology arm comprises about 50 to 100 bp, e.g., 55 to 95, 60 to 90, 70 to 90, or 80 to 90 bp, homology 5′ of the 1 nt target region. In certain embodiments, the 3′ homology arm may be about 25 to about 200 nucleotides in length, e.g., at least about 25, 50, 75, 100, 125, 150, 175, or 200 nucleotides in length. In certain embodiments, the 3′ homology arm comprises about 50 to 100 bp, e.g., 55 to 95, 60 to 90, 70 to 90, or 80 to 90 bp, homology 3′ of the 1 nt target region. In certain embodiments, the 5′ and 3′ homology arms are symmetrical in length. In certain embodiments, the 5′ and 3′ homology arms are asymmetrical in length. In certain embodiments, the template nucleic acid is an ssODN. In certain embodiments, the ssODN is a positive strand. In certain embodiments, the ssODN is a negative strand. In certain embodiments, the ssODN comprises, consists essentially of, or consists of SEQ ID NO:982 (OLI16417) or SEQ ID NO:983 (OLI16418).

[0388] In certain embodiments, the alteration at the CCAAT box target region recapitulates or is similar to a naturally occurring alteration, such as a 13 nt deletion. In certain embodiments, a template nucleic acid for introducing the 13 nt deletion at the 13 nt target region (HBG1 c.−116, HBG2 c.−116, or a combination thereof) may comprise a 5′ homology arm, a replacement sequence, and a 3′ homology arm, where the replacement sequence is 0 nucleotides or 0 bp. In certain embodiments, the 5′ homology arm may be about 25 to about 200 nucleotides in length, e.g., at least about 25, 50, 75, 100, 125, 150, 175, or 200 nucleotides in length. In certain embodiments, the 5′ homology arm comprises about 50 to 100 bp, e.g., 55 to 95, 60 to 90, 70 to 90, or 80 to 90 bp, homology 5′ of the 13 nt target region. In certain embodiments, the 3′ homology arm may be about 25 to about 200 nucleotides in length, e.g., at least about 25, 50, 75, 100, 125, 150, 175, or 200 nucleotides in length. In certain embodiments, the 3′ homology arm comprises about 50 to 100 bp, e.g., 55 to 95, 60 to 90, 70 to 90, or 80 to 90 bp, homology 3′ of the 13 nt target region. In certain embodiments, the 5′ and 3′ homology arms are symmetrical in length. In certain embodiments, the 5′ and 3′ homology arms are asymmetrical in length. In certain embodiments, the template nucleic acid is an ssODN. In certain embodiments, the ssODN is a positive strand. In certain embodiments, the ssODN is a negative strand. In certain embodiments, the ssODN comprises, consists essentially of, or consists of SEQ ID NO:979 (OLI16414) or SEQ ID NO:977 (OLI16412).

[0389] In certain embodiments, the alteration at the CCAAT box target region recapitulates or is similar to a naturally occurring alteration, such as a substitution from G to A at the −117G>A target region. In certain embodiments, a template nucleic acid for introducing the −117G>A substitution at the −117G>A target region (HBG1 c.−117 G>A, HBG2 c.−117 G>A, or a combination thereof) may comprise a 5′ homology arm, a replacement sequence, and a 3′ homology arm, where the replacement sequence is 0 nucleotides or 0 bp. In certain embodiments, the 5′ homology arm may be about 100 to about 200 nucleotides in length, e.g., at least about 100, 125, 150, 175, or 200 nucleotides in length. In certain embodiments, the 5′ homology arm comprises about 50 to 100 bp, e.g., 55 to 95, 60 to 90, 70 to 90, or 80 to 90 bp, homology 5′ of the −117G>A target region. In certain embodiments, the 3′ homology arm may be about 25 to about 200 nucleotides in length, e.g., at least about 25, 50, 75, 100, 125, 150, 175, or 200 nucleotides in length. In certain embodiments, the 3′ homology arm comprises about 50 to 100 bp, e.g., 55 to 95, 60 to 90, 70 to 90, or 80 to 90 bp, homology 3′ of the −117G>A target region. In certain embodiments, the 5′ and 3′ homology arms are symmetrical in length. In certain embodiments, the 5′ and 3′ homology arms are asymmetrical in length. In certain embodiments, the template nucleic acid is an ssODN. In certain embodiments, the ssODN is a positive strand. In certain embodiments, the ssODN is a negative strand. In certain embodiments, the ssODN comprises, consists essentially of, or consists of SEQ ID NO:980 (OLI16415) or SEQ ID NO:981 (OLI16416).

[0390] In certain embodiments, the 5′ homology arm comprises a 5′ phosphorothioate (PhTx) modification. In certain embodiments, the 3′ homology arm comprises a 3′ PhTx modification. In certain embodiments, the template nucleic acid comprises a 5′ and 3′ PhTx modification.

[0391] In certain embodiments, the ssODNs for introducing alterations (e.g., deletions) at the CCAAT box target region may be used in conjunction with an RNA nuclease and one or more gRNAs that target the CCAAT target region, for example, the gRNAs disclosed in Table 7, Table 10, Table 12, Table 13, Table 18, Table 19.

### Target Cells

[0392] Genome editing systems according to this disclosure can be used to manipulate or alter a cell, e.g., to edit or alter a target nucleic acid. The manipulating can occur, in various embodiments, in vivo or ex vivo.

[0393] A variety of cell types can be manipulated or altered according to the embodiments of this disclosure, and in some cases, such as in vivo applications, a plurality of cell types are altered or manipulated, for example by delivering genome editing systems according to this disclosure to a plurality of cell types. In other cases, however, it may be desirable to limit manipulation or alteration to a particular cell type or types. For instance, it can be desirable in some instances to edit a cell with limited differentiation potential or a terminally differentiated cell, such as a photoreceptor cell in the case of Maeder, in which modification of a genotype is expected to result in a change in cell phenotype. In other cases, however, it may be desirable to edit a less differentiated, multipotent or pluripotent, stem or progenitor cell. By way of example, the cell may be an embryonic stem cell, induced pluripotent stem cell (iPSC), hematopoietic stem/progenitor cell (HSPC), or other stem or progenitor cell type that differentiates into a cell type of relevance to a given application or indication.

[0394] As a corollary, the cell being altered or manipulated is, variously, a dividing cell or a non-dividing cell, depending on the cell type(s) being targeted and/or the desired editing outcome.

[0395] When cells are manipulated or altered ex vivo, the cells can be used (e.g. administered to a subject) immediately, or they can be maintained or stored for later use. Those of skill in the art will appreciate that cells can be maintained in culture or stored (e.g. frozen in liquid nitrogen) using any suitable method known in the art.

### Implementation of Genome Editing Systems: Delivery, Formulations, and Routes of Administration

[0396] As discussed above, the genome editing systems of this disclosure can be implemented in any suitable manner, meaning that the components of such systems, including without limitation the RNA-guided nuclease, gRNA, and optional donor template nucleic acid, can be delivered, formulated, or administered in any suitable form or combination of forms that results in the transduction, expression or introduction of a genome editing system and/or causes a desired repair outcome in a cell, tissue or subject. Tables 3 and 4 set forth several, non-limiting examples of genome editing system implementations. Those of skill in the art will appreciate, however, that these listings are not comprehensive, and that other implementations are possible. With reference to Table 3 in particular, the table lists several exemplary implementations of a genome editing system comprising a single gRNA and an optional donor template. However, genome editing systems according to this disclosure can incorporate multiple gRNAs, multiple RNA-guided nucleases, and other components such as proteins, and a variety of implementations will be evident to the skilled artisan based on the principles illustrated in the table. In the table, [N/A] indicates that the genome editing system does not include the indicated component.

TABLE 3
Genome Editing System Components

| RNA-guided | | Donor | |
|---|---|---|---|
| Nuclease | gRNA | Template | Comments |
| Protein | RNA | [N/A] | An RNA-guided nuclease protein |
| | | | complexed with a gRNA molecule |
| | | | (an RNP complex) |
| Protein | RNA | DNA | An RNP complex as described above |
| | | | plus a single-stranded or double |
| | | | stranded donor template. |
| Protein | DNA | [N/A] | An RNA-guided nuclease protein |
| | | | plus gRNA transcribed from DNA. |
| Protein | DNA | DNA | An RNA-guided nuclease protein |
| | | | plus gRNA-encoding DNA and a |
| | | | separate DNA donor template. |
| Protein | DNA | | An RNA-guided nuclease protein |
| | | | and a single DNA encoding both a |
| | | | gRNA and a donor template. |
| DNA | | | A DNA or DNA vector encoding an |
| | | | RNA-guided nuclease, a gRNA and a |
| | | | donor template. |
| DNA | DNA | [N/A] | Two separate DNAs, or two separate |
| | | | DNA vectors, encoding the RNA- |
| | | | guided nuclease and the gRNA, |
| | | | respectively. |
| DNA | DNA | DNA | Three separate DNAs, or three |
| | | | separate DNA vectors, encoding the |
| | | | RNA-guided nuclease, the gRNA and |
| | | | the donor template, respectively. |
| DNA | | [N/A] | A DNA or DNA vector encoding an |
| | | | RNA-guided nuclease and a gRNA |
| DNA | | DNA | A first DNA or DNA vector encoding |
| | | | an RNA-guided nuclease and a |
| | | | gRNA, and a second DNA or DNA |
| | | | vector encoding a donor template. |
| DNA | DNA | | A first DNA or DNA vector encoding |
| | | | an RNA-guided nuclease and second |
| | | | DNA or DNA vector encoding a |
| | | | gRNA and a donor template. |
| DNA | | | A first DNA or DNA vector encoding |
| | DNA | | an RNA-guided nuclease and a donor |
| | | | template, and a second DNA or DNA |
| | | | vector encoding a gRNA |
| DNA | | | A DNA or DNA vector encoding an |
| | RNA | | RNA-guided nuclease and a donor |
| | | | template, and a gRNA |

| | | |
|---|---|---|
| RNA | [N/A] | An RNA or RNA vector encoding an |
| | | RNA-guided nuclease and comprising |
| | | a gRNA |
| RNA | DNA | An RNA or RNA vector encoding an |
| | | RNA-guided nuclease and comprising |
| | | a gRNA, and a DNA or DNA vector |
| | | encoding a donor template. |

[0397] Table 4 summarizes various delivery methods for the components of genome editing systems, as described herein. Again, the listing is intended to be exemplary rather than limiting.

TABLE 4

| | | Delivery | | | |
|---|---|---|---|---|---|
| | | into Non- | | | Type of |
| | | Dividing | Duration of | Genome | Molecule |
| Delivery Vector/Mode | | Cells | Expression | Integration | Delivered |
| Physical (e.g., electroporation, | | YES | Transient | NO | Nucleic Acids |
| particle gun, Calcium Phosphate | | | | | and Proteins |
| transfection, cell compression or | | | | | |
| squeezing) | | | | | |
| Viral | Retrovirus | NO | Stable | YES | RNA |
| | Lentivirus | YES | Stable | YES/NO with | RNA |
| | | | | modifications | |
| | Adenovirus | YES | Transient | NO | DNA |
| | Adeno- | YES | Stable | NO | DNA |
| | Associated Virus | | | | |
| | (AAV) | | | | |
| | Vaccinia Virus | YES | Very | NO | DNA |
| | | | Transient | | |
| | Herpes Simplex | YES | Stable | NO | DNA |
| | Virus | | | | |
| Non-Viral | Cationic | YES | Transient | Depends on | Nucleic Acids |
| | Liposomes | | | what is | and Proteins |
| | | | | delivered | |
| | Polymeric | YES | Transient | Depends on | Nucleic Acids |
| | Nanoparticles | | | what is | and Proteins |
| | | | | delivered | |
| Biological | Attenuated | YES | Transient | NO | Nucleic Acids |
| Non-Viral | Bacteria | | | | |
| Delivery | Engineered | YES | Transient | NO | Nucleic Acids |
| Vehicles | Bacteriophages | | | | |
| | Mammalian | YES | Transient | NO | Nucleic Acids |
| | Virus-like | | | | |
| | Particles | | | | |
| | Biological | YES | Transient | NO | Nucleic Acids |
| | liposomes: | | | | |
| | Erythrocyte | | | | |
| | Ghosts and | | | | |
| | Exosomes | | | | |

[0398] Nucleic Acid-Based Delivery of Genome Editing Systems

[0399] Nucleic acids encoding the various elements of a genome editing system according to the present disclosure can be administered to subjects or delivered into cells by art-known methods or as described herein. For example, RNA-guided nuclease-encoding and/or gRNA-encoding DNA, as well as donor template nucleic acids can be delivered by, e.g., vectors (e.g., viral or non-viral vectors), non-vector based methods (e.g., using naked DNA or DNA complexes), or a combination thereof.

[0400] Nucleic acids encoding genome editing systems or components thereof can be delivered directly to cells as naked DNA or RNA, for instance by means of transfection or electroporation, or can be conjugated to molecules (e.g., N-acetylgalactosamine) promoting uptake by the target cells (e.g., erythrocytes, HSCs). Nucleic acid vectors, such as the vectors summarized in Table 4, can also be used.

[0401] Nucleic acid vectors can comprise one or more sequences encoding genome editing system components, such as an RNA-guided nuclease, a gRNA and/or a donor template. A vector can also comprise a sequence encoding a signal peptide (e.g., for nuclear localization, nucleolar localization, or mitochondrial localization), associated with (e.g., inserted into or fused to) a sequence coding for a protein. As one example, a nucleic acid vectors can include a Cas9 coding sequence that includes one or more nuclear localization sequences (e.g., a nuclear localization sequence from SV40).

[0402] The nucleic acid vector can also include any suitable number of regulatory/control elements, e.g., promoters, enhancers, introns, polyadenylation signals, Kozak consensus sequences, or internal ribosome entry sites (IRES). These elements are well known in the art, and are described in Cotta-Ramusino.

[0403] Nucleic acid vectors according to this disclosure include recombinant viral vectors. Exemplary viral vectors are set forth in Table 4, and additional suitable viral vectors and their use and production are described in Cotta-Ramusino. Other viral vectors known in the art can also be used. In addition, viral particles can be used to deliver genome editing system components in nucleic acid and/or peptide form. For example, “empty” viral particles can be assembled to contain any suitable cargo. Viral vectors and viral particles can also be engineered to incorporate targeting ligands to alter target tissue specificity.

[0404] In addition to viral vectors, non-viral vectors can be used to deliver nucleic acids encoding genome editing systems according to the present disclosure. One important category of non-viral nucleic acid vectors are nanoparticles, which can be organic or inorganic. Nanoparticles are well known in the art, and are summarized in Cotta-Ramusino. Any suitable nanoparticle design can be used to deliver genome editing system components or nucleic acids encoding such components. For instance, organic (e.g. lipid and/or polymer) nonparticles can be suitable for use as delivery vehicles in certain embodiments of this disclosure. Exemplary lipids for use in nanoparticle formulations, and/or gene transfer are shown in Table 5, and Table 6 lists exemplary polymers for use in gene transfer and/or nanoparticle formulations.

TABLE 5
Lipids Used for Gene Transfer

| Lipid | Abbreviation | Feature |
|---|---|---|
| 1,2-Dioleoyl-sn-glycero-3-phosphatidylcholine | DOPC | Helper |
| 1,2-Dioleoyl-sn-glycero-3-phosphatidylethanolamine | DOPE | Helper |
| Cholesterol | | Helper |
| N-[1-(2,3-Dioleyloxy)propyl]N,N,N-trimethylammonium chloride | DOTMA | Cationic |
| 1,2-Dioleoyloxy-3-trimethylammonium-propane | DOTAP | Cationic |
| Dioctadecylamidoglycylspermine | DOGS | Cationic |
| N-(3-Aminopropyl)-N,N-dimethyl-2,3-bis(dodecyloxy)-1- | GAP-DLRIE | Cationic |
| propanaminium bromide | | |
| Cetyltrimethylammonium bromide | CTAB | Cationic |
| 6-Lauroxyhexyl ornithinate | LHON | Cationic |
| 1-(2,3-Dioleoyloxypropyl)-2,4,6-trimethylpyridinium | 2Oc | Cationic |
| 2,3-Dioleyloxy-N-[2(sperminecarboxamido-ethyl]-N,N-dimethyl-1- | DOSPA | Cationic |
| propanaminium trifluoroacetate | | |
| 1,2-Dioleyl-3-trimethylammonium-propane | DOPA | Cationic |
| N-(2-Hydroxyethyl)-N,N-dimethyl-2,3-bis(tetradecyloxy)-1- | MDRIE | Cationic |
| propanaminium bromide | | |
| Dimyristooxypropyl dimethyl hydroxyethyl ammonium bromide | DMRI | Cationic |
| 3β-[N-(N′,N′-Dimethylaminoethane)-carbamoyl]cholesterol | DC-Chol | Cationic |
| Bis-guanidium-tren-cholesterol | BGTC | Cationic |
| 1,3-Diodeoxy-2-(6-carboxy-spermyl)-propylamide | DOSPER | Cationic |
| Dimethyloctadecylammonium bromide | DDAB | Cationic |
| Dioctadecylamidoglicylspermidin | DSL | Cationic |
| rac-[(2,3-Dioctadecyloxypropyl)(2-hydroxyethyl)]-dimethylammonium | CLIP-1 | Cationic |
| chloride | | |
| rac-[2(2,3-Dihexadecyloxypropyl- | CLIP-6 | Cationic |
| oxymethyloxy)ethyl]trimethylammonium bromide | | |
| Ethyldimyristoylphosphatidylcholine | EDMPC | Cationic |
| 1,2-Distearyloxy-N,N-dimethyl-3-aminopropane | DSDMA | Cationic |
| 1,2-Dimyristoyl-trimethylammonium propane | DMTAP | Cationic |
| O,O′-Dimyristyl-N-lysyl aspartate | DMKE | Cationic |
| 1,2-Distearoyl-sn-glycero-3-ethylphosphocholine | DSEPC | Cationic |
| N-Palmitoyl D-erythro-sphingosyl carbamoyl-spermine | CCS | Cationic |
| N-t-Butyl-N0-tetradecyl-3-tetradecylaminopropionamidine | diC14-amidine | Cationic |
| Octadecenolyoxy[ethyl-2-heptadecenyl-3 hydroxyethyl] imidazolinium | DOTIM | Cationic |
| chloride | | |
| N1-Cholesteryloxycarbonyl-3,7-diazanonane-1,9-diamine | CDAN | Cationic |
| 2-(3-[Bis(3-arnino-propyl)-amino]propylamino)-N- | RPR209120 | Cationic |
| ditetradecylcarbamoylme-ethyl-acetamide | | |
| 1,2-dilinoleyloxy-3-dimethylaminopropane | DLinDMA | Cationic |
| 2,2-dilinoleyl-4-dimethylaminoethyl-[1,3]-dioxolane | DLin-KC2-DMA | Cationic |
| dilinoleyl-methyl-4-dimethylaminobutyrate | DLin-MC3-DMA | Cationic |

TABLE 6
Polymers Used for Gene Transfer

| Polymer | Abbreviation |
|---|---|
| Poly(ethylene)glycol | PEG |
| Polyethylenimine | PEI |
| Dithiobis(succinimidylpropionate) | DSP |
| Dimethyl-3,3′-dithiobispropionimidate | DTBP |
| Poly(ethylene imine) biscarbamate | PEIC |
| Poly(L-lysine) | PLL |
| Histidine modified PLL | |
| Poly(N-vinylpyrrolidone) | PVP |
| Poly(propylenimine) | PPI |
| Poly(amidoamine) | PAMAM |
| Poly(amido ethylenimine) | SS-PAEI |
| Triethylenetetramine | TETA |
| Poly(β-aminoester) | |
| Poly(4-hydroxy-L-proline ester) | PHP |
| Poly(allylamine) | |
| Poly(α-[4-aminobutyl]-L-glycolic acid) | PAGA |
| Poly(D,L-lactic-co-glycolic acid) | PLGA |
| Poly(N-ethyl-4-vinylpyridinium bromide) | |
| Poly(phosphazene)s | PPZ |
| Poly(phosphoester)s | PPE |
| Poly(phosphoramidate)s | PPA |
| Poly(N-2-hydroxypropylmethacrylamide) | pHPMA |
| Poly (2-(dimethylamino)ethyl methacrylate) | pDMAEMA |
| Poly(2-aminoethyl propylene phosphate) | PPE-EA |
| Chitosan | |
| Galactosylated chitosan | |
| N-Dodacylated chitosan | |
| Histone | |
| Collagen | |
| Dextran-spermine | D-SPM |

[0405] Non-viral vectors optionally include targeting modifications to improve uptake and/or selectively target certain cell types. These targeting modifications can include e.g., cell specific antigens, monoclonal antibodies, single chain antibodies, aptamers, polymers, sugars (e.g., N-acetylgalactosamine (GalNAc)), and cell penetrating peptides. Such vectors also optionally use fusogenic and endosome-destabilizing peptides/polymers, undergo acid-triggered conformational changes (e.g., to accelerate endosomal escape of the cargo), and/or incorporate a stimuli-cleavable polymer, e.g., for release in a cellular compartment. For example, disulfide-based cationic polymers that are cleaved in the reducing cellular environment can be used.

[0406] In certain embodiments, one or more nucleic acid molecules (e.g., DNA molecules) other than the components of a genome editing system, e.g., the RNA-guided nuclease component and/or the gRNA component described herein, are delivered. In certain embodiments, the nucleic acid molecule is delivered at the same time as one or more of the components of the Genome editing system. In certain embodiments, the nucleic acid molecule is delivered before or after (e.g., less than about 30 minutes, 1 hour, 2 hours, 3 hours, 6 hours, 9 hours, 12 hours, 1 day, 2 days, 3 days, 1 week, 2 weeks, or 4 weeks) one or more of the components of the Genome editing system are delivered. In certain embodiments, the nucleic acid molecule is delivered by a different means than one or more of the components of the genome editing system, e.g., the RNA-guided nuclease component and/or the gRNA component, are delivered. The nucleic acid molecule can be delivered by any of the delivery methods described herein. For example, the nucleic acid molecule can be delivered by a viral vector, e.g., an integration-deficient lentivirus, and the RNA-guided nuclease molecule component and/or the gRNA component can be delivered by electroporation, e.g., such that the toxicity caused by nucleic acids (e.g., DNAs) can be reduced. In certain embodiments, the nucleic acid molecule encodes a therapeutic protein, e.g., a protein described herein. In certain embodiments, the nucleic acid molecule encodes an RNA molecule, e.g., an RNA molecule described herein.

[0407] Delivery of RNPs and or RNA Encoding Genome Editing System Components

[0408] RNPs (complexes of gRNAs and RNA-guided nucleases) and/or RNAs encoding RNA-guided nucleases and/or gRNAs, can be delivered into cells or administered to subjects by art-known methods, some of which are described in Cotta-Ramusino. In vitro, RNA-guided nuclease-encoding and/or gRNA-encoding RNA can be delivered, e.g., by microinjection, electroporation, transient cell compression or squeezing (see, e.g., Lee 2012). Lipid-mediated transfection, peptide-mediated delivery, GalNAc- or other conjugate-mediated delivery, and combinations thereof, can also be used for delivery in vitro and in vivo. A protective, interactive, non-condensing (PINC) system may be used for delivery.

[0409] In vitro delivery via electroporation comprises mixing the cells with the RNA encoding RNA-guided nucleases and/or gRNAs, with or without donor template nucleic acid molecules, in a cartridge, chamber or cuvette and applying one or more electrical impulses of defined duration and amplitude. Systems and protocols for electroporation are known in the art, and any suitable electroporation tool and/or protocol can be used in connection with the various embodiments of this disclosure.

[0410] Route of Administration

[0411] Genome editing systems, or cells altered or manipulated using such systems, can be administered to subjects by any suitable mode or route, whether local or systemic. Systemic modes of administration include oral and parenteral routes. Parenteral routes include, by way of example, intravenous, intramarrow, intrarterial, intramuscular, intradermal, subcutaneous, intranasal, and intraperitoneal routes. Components administered systemically can be modified or formulated to target, e.g., HSCs, hematopoietic stem/progenitor cells, or erythroid progenitors or precursor cells.

[0412] Local modes of administration include, by way of example, intramarrow injection into the trabecular bone or intrafemoral injection into the marrow space, and infusion into the portal vein. In certain embodiments, significantly smaller amounts of the components (compared with systemic approaches) can exert an effect when administered locally (for example, directly into the bone marrow) compared to when administered systemically (for example, intravenously). Local modes of administration can reduce or eliminate the incidence of potentially toxic side effects that may occur when therapeutically effective amounts of a component are administered systemically.

[0413] Administration can be provided as a periodic bolus (for example, intravenously) or as continuous infusion from an internal reservoir or from an external reservoir (for example, from an intravenous bag or implantable pump). Components can be administered locally, for example, by continuous release from a sustained release drug delivery device.

[0414] In addition, components can be formulated to permit release over a prolonged period of time. A release system can include a matrix of a biodegradable material or a material which releases the incorporated components by diffusion. The components can be homogeneously or heterogeneously distributed within the release system. A variety of release systems can be useful, however, the choice of the appropriate system will depend upon rate of release required by a particular application. Both non-degradable and degradable release systems can be used. Suitable release systems include polymers and polymeric matrices, non-polymeric matrices, or inorganic and organic excipients and diluents such as, but not limited to, calcium carbonate and sugar (for example, trehalose). Release systems may be natural or synthetic. However, synthetic release systems are preferred because generally they are more reliable, more reproducible and produce more defined release profiles. The release system material can be selected so that components having different molecular weights are released by diffusion through or degradation of the material.

[0415] Representative synthetic, biodegradable polymers include, for example: polyamides such as poly(amino acids) and poly(peptides); polyesters such as poly(lactic acid), poly(glycolic acid), poly(lactic-co-glycolic acid), and poly(caprolactone); poly(anhydrides); polyorthoesters; polycarbonates; and chemical derivatives thereof (substitutions, additions of chemical groups, for example, alkyl, alkylene, hydroxylations, oxidations, and other modifications routinely made by those skilled in the art), copolymers and mixtures thereof. Representative synthetic, non-degradable polymers include, for example: polyethers such as poly(ethylene oxide), poly(ethylene glycol), and poly(tetramethylene oxide); vinyl polymers-polyacrylates and polymethacrylates such as methyl, ethyl, other alkyl, hydroxyethyl methacrylate, acrylic and methacrylic acids, and others such as poly(vinyl alcohol), poly(vinyl pyrolidone), and poly(vinyl acetate); poly(urethanes); cellulose and its derivatives such as alkyl, hydroxyalkyl, ethers, esters, nitrocellulose, and various cellulose acetates; polysiloxanes; and any chemical derivatives thereof (substitutions, additions of chemical groups, for example, alkyl, alkylene, hydroxylations, oxidations, and other modifications routinely made by those skilled in the art), copolymers and mixtures thereof.

[0416] Poly(lactide-co-glycolide) microsphere can also be used. Typically the microspheres are composed of a polymer of lactic acid and glycolic acid, which are structured to form hollow spheres. The spheres can be approximately 15-30 microns in diameter and can be loaded with components described herein. In some embodiments, genome editing systems, system components and/or nucleic acids encoding system components, are delivered with a block copolymer such as a poloxamer or a poloxamine.

[0417] Multi-Modal or Differential Delivery of Components

[0418] Skilled artisans will appreciate, in view of the instant disclosure, that different components of genome editing systems disclosed herein can be delivered together or separately and simultaneously or non-simultaneously. Separate and/or asynchronous delivery of genome editing system components can be particularly desirable to provide temporal or spatial control over the function of genome editing systems and to limit certain effects caused by their activity.

[0419] Different or differential modes as used herein refer to modes of delivery that confer different pharmacodynamic or pharmacokinetic properties on the subject component molecule, e.g., a RNA-guided nuclease molecule, gRNA, template nucleic acid, or payload. For example, the modes of delivery can result in different tissue distribution, different half-life, or different temporal distribution, e.g., in a selected compartment, tissue, or organ.

[0420] Some modes of delivery, e.g., delivery by a nucleic acid vector that persists in a cell, or in progeny of a cell, e.g., by autonomous replication or insertion into cellular nucleic acid, result in more persistent expression of and presence of a component. Examples include viral, e.g., AAV or lentivirus, delivery.

[0421] By way of example, the components of a genome editing system, e.g., a RNA-guided nuclease and a gRNA, can be delivered by modes that differ in terms of resulting half-life or persistent of the delivered component the body, or in a particular compartment, tissue or organ. In certain embodiments, a gRNA can be delivered by such modes. The RNA-guided nuclease molecule component can be delivered by a mode which results in less persistence or less exposure to the body or a particular compartment or tissue or organ.

[0422] More generally, in certain embodiments, a first mode of delivery is used to deliver a first component and a second mode of delivery is used to deliver a second component. The first mode of delivery confers a first pharmacodynamic or pharmacokinetic property. The first pharmacodynamic property can be, e.g., distribution, persistence, or exposure, of the component, or of a nucleic acid that encodes the component, in the body, a compartment, tissue or organ. The second mode of delivery confers a second pharmacodynamic or pharmacokinetic property. The second pharmacodynamic property can be, e.g., distribution, persistence, or exposure, of the component, or of a nucleic acid that encodes the component, in the body, a compartment, tissue or organ.

[0423] In certain embodiments, the first pharmacodynamic or pharmacokinetic property, e.g., distribution, persistence or exposure, is more limited than the second pharmacodynamic or pharmacokinetic property.

[0424] In certain embodiments, the first mode of delivery is selected to optimize, e.g., minimize, a pharmacodynamic or pharmacokinetic property, e.g., distribution, persistence or exposure.

[0425] In certain embodiments, the second mode of delivery is selected to optimize, e.g., maximize, a pharmacodynamic or pharmacokinetic property, e.g., distribution, persistence or exposure.

[0426] In certain embodiments, the first mode of delivery comprises the use of a relatively persistent element, e.g., a nucleic acid, e.g., a plasmid or viral vector, e.g., an AAV or lentivirus. As such vectors are relatively persistent product transcribed from them would be relatively persistent.

[0427] In certain embodiments, the second mode of delivery comprises a relatively transient element, e.g., an RNA or protein.

[0428] In certain embodiments, the first component comprises gRNA, and the delivery mode is relatively persistent, e.g., the gRNA is transcribed from a plasmid or viral vector, e.g., an AAV or lentivirus. Transcription of these genes would be of little physiological consequence because the genes do not encode for a protein product, and the gRNAs are incapable of acting in isolation. The second component, a RNA-guided nuclease molecule, is delivered in a transient manner, for example as mRNA or as protein, ensuring that the full RNA-guided nuclease molecule/gRNA complex is only present and active for a short period of time.

[0429] Furthermore, the components can be delivered in different molecular form or with different delivery vectors that complement one another to enhance safety and tissue specificity.

[0430] Use of differential delivery modes can enhance performance, safety, and/or efficacy, e.g., the likelihood of an eventual off-target modification can be reduced. Delivery of immunogenic components, e.g., Cas9 molecules, by less persistent modes can reduce immunogenicity, as peptides from the bacterially-derived Cas enzyme are displayed on the surface of the cell by MHC molecules. A two-part delivery system can alleviate these drawbacks.

[0431] Differential delivery modes can be used to deliver components to different, but overlapping target regions. The formation active complex is minimized outside the overlap of the target regions. Thus, in certain embodiments, a first component, e.g., a gRNA is delivered by a first delivery mode that results in a first spatial, e.g., tissue, distribution. A second component, e.g., a RNA-guided nuclease molecule is delivered by a second delivery mode that results in a second spatial, e.g., tissue, distribution. In certain embodiments, the first mode comprises a first element selected from a liposome, nanoparticle, e.g., polymeric nanoparticle, and a nucleic acid, e.g., viral vector. The second mode comprises a second element selected from the group. In certain embodiments, the first mode of delivery comprises a first targeting element, e.g., a cell specific receptor or an antibody, and the second mode of delivery does not include that element. In certain embodiments, the second mode of delivery comprises a second targeting element, e.g., a second cell specific receptor or second antibody.

[0432] When the RNA-guided nuclease molecule is delivered in a virus delivery vector, a liposome, or polymeric nanoparticle, there is the potential for delivery to and therapeutic activity in multiple tissues, when it may be desirable to only target a single tissue. A two-part delivery system can resolve this challenge and enhance tissue specificity. If the gRNA and the RNA-guided nuclease molecule are packaged in separated delivery vehicles with distinct but overlapping tissue tropism, the fully functional complex is only be formed in the tissue that is targeted by both vectors.

### EXAMPLES

[0433] The principles and embodiments described above are further illustrated by the non-limiting examples that follow:

### Example 1: Screening of S. pyogenes gRNAs Delivered to K562 Cells as Ribonucleoprotein Complexes for Use in Causing 13 nt Deletions in HBG1 and HBG2 Regulatory Regions

[0434] gRNAs targeting a 26 nt fragment spanning and including the 13 nucleotides at the 13 nt target region of HBG1 and HBG2 were designed by standard methods. After gRNAs were designed in silico and tiered, a subset of the gRNAs were selected and screened for activity and specificity in human K562 cells. The gRNAs selected for screening are set forth in Table 7. Briefly, gRNAs were in vitro transcribed and then complexed with S. pyogenes wildtype (Wt) Cas9 protein to form ribonucleoprotein complexes (RNPs). The gRNAs complexed to S. pyogenes Cas9 protein were modified sgRNAs ((e.g., 5′ ARCA capped and 3′ polyA (20A) tail; Table 7) and target the HBG1 and HBG2 regulatory regions. To allow for direct comparison of the activity of these RNPs in K562 cells and human CD34+ cells, RNPs were first delivered to K562 cells by electroporation (Amaxa Nucleofector).

[0435] Three days after RNP electroporation, gDNA was extracted from K562 cells and then the HBG1 and HBG2 loci were PCR amplified from the gDNA. Gene editing was evaluated in the PCR products by T7E1 endonuclease assay analysis. Eight out of nine RNPs supported a high percentage of NHEJ. Sp37 RNP, the only gRNA shown to be active in human CD34+ cells (<10% editing in CD34+ cells) was highly active in K562 cells, with >60% indels detected at both HBG1 and HBG2 and eight cut in both the HBG1 and HBG2 targeted regions in the promoter sequences (FIG. 3A).

TABLE 7
Selected gRNAs for screening in K562 cells or CD34⁺ cells

| | Targeting | Targeting | Targeting domain | Targeting domain | |
|---|---|---|---|---|---|
| | domain | domain | sequence plus | sequence plus | |
| gRNA | sequence | sequence | PAM (NGG) | PAM (NGG) | |
| ID | (RNA) | (DNA) | (RNA) | (DNA) | Sense |
| Sp9 | GGCUAUUGGU | GGCTATTGGTCA | GGCUAUUGGUCA | GGCTATTGGTCA | Antisense |
| | CAAGGCA | AGGCA | AGGCAAGG | AGGCAAGG | |
| | (SEQ ID NO: 277) | (SEQ ID NO: 910) | (SEQ ID NO: 920) | (SEQ ID NO: 930) | |
| Sp36 | CAAGGCUAUU | CAAGGCTATTGG | CAAGGCUAUUGG | CAAGGCTATTGG | Antisense |
| | GGUCAAGGCA | TCAAGGCA | UCAAGGCAAGG | TCAAGGCAAGG | |
| | (SEQ ID NO: 338) | (SEQ ID NO: 911) | (SEQ ID NO: 921) | (SEQ ID NO: 931) | |
| Sp40 | UGCCUUGUCA | TGCCTTGTCAAG | UGCCUUGUCAAGG | TGCCTTGTCAAG | Antisense |
| | AGGCUAU | GCTAT | CUAUUGG | GCTATTGG | |
| | (SEQ ID NO: 327) | (SEQ ID NO: 912) | (SEQ ID NO: 922) | (SEQ ID NO: 932) | |
| Sp42 | GUUUGCCUUG | GTTTGCCTTGTC | GUUUGCCUUGUCA | GTTTGCCTTGTC | Antisense |
| | UCAAGGCUAU | AAGGCTAT | AGGCUAUUGG | AAGGCTATTGG | |
| | (SEQ ID NO: 299) | (SEQ ID NO: 913) | (SEQ ID NO: 923) | (SEQ ID NO: 933) | |
| Sp38 | GACCAAUAGC | GACCAATAGCCT | GACCAAUAGCCUU | GACCAATAGCCT | Sense |
| | CUUGACA | TGACA | GACAAGG | TGACAAGG | |
| | (SEQ ID NO: 276) | (SEQ ID NO: 914) | (SEQ ID NO: 924) | (SEQ ID NO: 934) | |
| Sp37 | CUUGACCAAU | CTTGACCAATAG | CUUGACCAAUAGC | CTTGACCAATAG | Sense |
| | AGCCUUGACA | CCTTGACA | CUUGACAAGG | CCTTGACAAGG | |
| | (SEQ ID NO: 333) | (SEQ ID NO: 915) | (SEQ ID NO: 925) | (SEQ ID NO: 935) | |
| Sp43 | GUCAAGGCUA | GTCAAGGCTATT | GUCAAGGCUAUU | GTCAAGGCTATT | Antisense |
| | UUGGUCA | GGTCA | GGUCAAGG | GGTCAAGG | |
| | (SEQ ID NO: 278) | (SEQ ID NO: 916) | (SEQ ID NO: 926) | (SEQ ID NO: 936) | |
| Sp35 | CUUGUCAAGG | CTTGTCAAGGCT | CUUGUCAAGGCUA | CTTGTCAAGGCT | Antisense |
| | CUAUUGGUCA | ATTGGTCA | UUGGUCAAGG | ATTGGTCAAGG | |
| | (SEQ ID NO: 339) | (SEQ ID NO: 917) | (SEQ ID NO: 927) | (SEQ ID NO: 937) | |
| Sp41 | UCAAGUUUGC | TCAAGTTTGCCT | UCAAGUUUGCCUU | TCAAGTTTGCCT | Antisense |
| | CUUGUCA | TGTCA | GUCAAGG | TGTCAAGG | |
| | (SEQ ID NO: 310) | (SEQ ID NO: 918) | (SEQ ID NO: 928) | (SEQ ID NO: 938) | |
| Sp34 | UGGUCAAGUU | TGGTCAAGTTTG | UGGUCAAGUUUG | TGGTCAAGTTTG | Antisense |
| | UGCCUUGUCA | CCTTGTCA | CCUUGUCAAGG | CCTTGTCAAGG | |
| | (SEQ ID NO: 340) | (SEQ ID NO: 919) | (SEQ ID NO: 929) | (SEQ ID NO: 939) | |
| Sp85 | AGUAUCCAGU | AGTATCCAGTGA | AGUAUCCAGUGA | AGTATCCAGTGA | Antisense |
| | GAGGCCA | GGCCA | GGCCAGGG | GGCCAGGG | |
| | (SEQ ID NO: 940) | (SEQ ID NO: 943) | (SEQ ID NO: 946) | (SEQ ID NO: 949) | |
| SpA | GGCAAGGCUG | GGCAAGGCTGG | GGCAAGGCUGGCC | GGCAAGGCTGG | Sense |
| | GCCAACCCAU | CCAACCCAT | AACCCAUGGG | CCAACCCATGGG | |
| | (SEQ ID NO: 941) | (SEQ ID NO: 944) | (SEQ ID NO: 947) | (SEQ ID NO: 950) | |
| SpB | UAUUUGCAUU | TATTTGCATTGA | UAUUUGCAUUGA | TATTTGCATTGA | Sense |
| | GAGAUAGUGU | GATAGTGT | GAUAGUGUGGG | GATAGTGTGGG | |
| | (SEQ ID NO: 942) | (SEQ ID NO: 945) | (SEQ ID NO: 948) | (SEQ ID NO: 951) | |

[0436] The HBG1 and HBG2 PCR products for the K562 cells that were targeted with the eight active sgRNAs were then analyzed by DNA sequencing analysis and scored for insertions and deletions detected. The deletions were subdivided into precise 13 nt deletions at the target site, 13 nt target site inclusive and proximal small deletions (18-26 nt), 12 nt deletions (i.e., partial deletion) of the 13 nt target site, >26 nt deletions that span a portion of the HPFH target site, and other deletions, e.g., deletions proximal to but outside the HPFH target site. Seven of the eight sgRNAs targeted deletion of the 13 nt (HPFH mutation induction) (FIG. 3B) for HBG1. At least five of the eight sgRNAs also supported targeted deletion of the 13 nt in HBG2 promoter region (FIG. 3C). Note that DNA sequence results for HBG2 in cells treated with HBG Sp34 sgRNA were not available. These data indicate that Cas9 and sgRNA support precise induction of the 13 nt deletions. FIGS. 3B-3C depict examples of the types of deletions observed in target sequences in HBG1.

### Example 2: Cas9 RNP Containing gRNA Targeting the 13 nt Deletion Mutation Supports Gene Editing in Human Hematopoietic Stem/Progenitor Cells

[0437] Of the RNPs containing different gRNAs tested in human cord blood (CB) CD34+ cells, only Sp37 resulted in detectable editing at the target site in the HBG1 and HBG2 promoters as determined by T7E1 analysis of indels in HBG1 and HBG2 specific PCR products amplified from gDNA extracted from electroporated CB CD34+ cells from a three cord blood donors (FIG. 4A). The average level of editing detected in cells electroporated with Cas9 protein complexed to Sp37 was 5±2% indels at HBG1 and 3±1% indels detected at HBG2 (3 separate experiments, and CB donors).

[0438] Next, three S. pyogenes gRNAs whose target sites are within the HBG promoter (Sp35, Sp36, Sp37) were complexed to wild-type S. pyogenes Cas9 protein to form ribonucleoprotein complexes. These HBG targeted RNPS were electroporated into CB CD34+ cells (n=3 donors) and adult mobilized peripheral blood (mPB) CD34+ cell donors (n=3 donors). Then the level of insertions/deletions at the target site was analyzed by T7E1 endonuclease analysis of the HBG2 PCR products amplified from genomic DNA extracted from the samples approximately 3 days after Cas9 RNP delivery. Each of these RNPs supported only low level gene editing in both the CB and adult CD34+ cells across 3 donors and 3 separate experiments (FIG. 4B).

[0439] To increase gene editing and the occurrence of the 13 nt deletion at the target site, single strand deoxynucleotide donor repair templates (ssODNs) that encoded 87 nt and 89 nt of homology on each side of the targeted deletion site was generated. The ssODNs, either unmodified at the ends (i.e., ssODN1, SEQ ID NO:906, Table 8) or modified to contain phosphorothioates (PhTx) at the 5′ and 3′ ends (i.e., PhTx ssODN1, SEQ ID NO:909, Table 8). The ssODN was designed to ‘encode’ the 13 nt deletion with sequence homology arms engineered flanking this absent sequence to create a perfect deletion.

TABLE 8
Single strand deoxynucleotide donor repair
templates (ssODN)

| | SEQ | |
|---|---|---|
| | ID | |
| ssODN ID | NO | Sequence |
| ssODN1 | 904 | GGGTGCTTCCTTTTATTCTTCATCCCTAGCCAG |
| 5′ homology | | CCGCCGGCCCCTGGCCTCACTGGATACTCTAAG |
| arm | | ACTATTGGTCAAGTTTGCCTT |
| ssODN1 | 905 | GTCAAGGCAAGGCTGGCCAACCCATGGGTGGAG |
| 3′ homology | | TTTAGCCAGGGACCGTTTCAGACAGATATTTGC |
| arm | | ATTGAGATAGTGTGGGGAAGGGG |
| ssODN1 | 906 | GGGTGCTTCCTTTTATTCTTCATCCCTAGCCAG |
| | | CCGCCGGCCCCTGGCCTCACTGGATACTCTAAG |
| | | ACTATTGGTCAAGTTTGCCTTGTCAAGGCAAGG |
| | | CTGGCCAACCCATGGGTGGAGTTTAGCCAGGGA |
| | | CCGTTTCAGACAGATATTTGCATTGAGATAGTG |
| | | TGGGGAAGGGG |
| PhTx ssODN1 | 907 | G*GGTGCTTCCTTTTATTCTTCATCCCTAGCCA |
| 5′ homology | | GCCGCCGGCCCCTGGCCTCACTGGATACTCTAA |
| arm | | GACTATTGGTCAAGTTTGCCTT |
| PhTx ssODN1 | 908 | GTCAAGGCAAGGCTGGCCAACCCATGGGTGGAG |
| 3′ homology | | TTTAGCCAGGGACCGTTTCAGACAGATATTTGC |
| arm | | ATTGAGATAGTGTGGGGAAGGG*G |
| PhTx ssODN1 | 909 | G*GGTGCTTCCTTTTATTCTTCATCCCTAGCCA |
| | | GCCGCCGGCCCCTGGCCTCACTGGATACTCTAA |
| | | GACTATTGGTCAAGTTTGCCTTGTCAAGGCAAG |
| | | GCTGGCCAACCCATGGGTGGAGTTTAGCCAGGG |
| | | ACCGTTTCAGACAGATATTTGCATTGAGATAGT |
| | | GTGGGGAAGGG*G |

The homology arms flanking the deletion are indicated by bold [5′ homology arm] and underline [3′ homology arm]).
Note
the absence of the 13 bp sequence in ssODN1 and PhTx ssODN1.
*Represents modification by phosphorothioate.

[0440] ssODN1 and PhTx ssODN1 were co-delivered with RNP targeting HBG containing the Sp37 gRNA (HBG Sp37 RNP) or HBG Sp35 (HBG Sp35 RNP) to CB CD34+ cells. Co-delivery of the ssODN donor encoding the 13 nt deletion with HBG Sp35 RNP or HBG Sp37 RNP led to a 6-fold and 5-fold increase in gene editing of the target site, respectively, as determined by T7E1 analysis of the HBG2 PCR product (FIG. 4C). DNA sequencing analysis (Sanger sequencing) of the HBG2 PCR product indicated that 20% gene editing in cells that were treated with HBG Sp37 RNP and the PhTx modified ssODN1, with 15% deletions and 5% insertions (FIG. 4C, lower left panel). Further analysis of the specific type and size of deletions at the target site revealed that 75% of the total deletions detected contained the 13 nt deletion (which included deletion at c.−110 of the CAAT box in the proximal promoter), the absence of which is associated with elevation of HbF expression (FIG. 4C, lower right panel). The remaining % of deletions were partial deletions that did not span the full 13 nt deletion. These data indicate that co-delivery of a homologous ssODN that is engineered to have a deletion supported precise gene editing (deletion) at HBG in human CD34+ cells.

### Example 3: Cas9 RNP Targeting the 13 nt Deletion Mutation Supports Gene Editing in Human Adult Mobilized Peripheral Blood Hematopoietic Stem/Progenitor Cells with Increased HBG Expression in Erythroblast Progeny

[0441] To determine whether editing HBG with Cas9 RNP complexed to Sp37 gRNA or Sp35 gRNA (i.e., the gRNAs that target the 13 nt deletion that is associated with HPFH) in the promoter of HBG supports an increase in HBG expression in erythroid progeny of edited CD34+ cells, human adult CD34+ cells from mobilized peripheral blood (mPB) were electroporated with the RNPs. Briefly, mPB CD34+ cells were prestimulated for 2 days with human cytokines and PGE2 in StemSpan SFEM and then electroporated with Cas9 protein precomplexed to Sp35 and Sp37, respectively. T7E1 analysis of HBG PCR product indicated ˜3% indels detected for mPB CD34+ cells treated with RNP complexed to Sp37 while no editing was detected for cells that were treated with RNP complexed to Sp35 (FIG. 5A).

[0442] In order to increase gene editing at the target site and to increase the occurrence of the 13 nt deletion at the target site, PhTx ssODN1 (SEQ ID NO:909) was co-delivered with the precomplexed RNP targeting HBG containing the Sp37 gRNA. Co-delivery of the ssODN donor encoding the 13 nt deletion led to a nearly 2-fold increase in gene editing of the target site (FIG. 5A). To determine whether editing HBG increases production of fetal hemoglobin in erythroid progeny of edited adult CD34+ cells, the cells were differentiated into erythroblasts by culture for up to 18 days in the presence of human cytokines (erythropoietin, SCF, IL3), human plasma (Octoplas), and other supplements (hydrocortisone, heparin, transferrin). Over the time course of differentiation, mRNA was collected to evaluate HBG gene expression in the erythroid progeny of RNP treated mPB CD34+ cells and donor matched negative (untreated) controls. By day 7 of differentiation, erythroblast progeny of human CD34+ cells that were treated with HBG Sp37 RNP and 13 nt deletion encoding ssODN (˜5% indels detected in gDNA from the bulk cell population by T7E1 analysis) exhibited a 2-fold increase in HBG mRNA production (FIG. 5B). Importantly, CD34+ cells that were electroporated with HBG RNP maintained their ex vivo hematopoietic activity (i.e., no difference in the quantity or diversity of erythroid and myeloid colonies compared to untreated donor matched CD34+ cell negative control), as determined in hematopoietic colony forming cell (CFC) assays (FIG. 6A). Furthermore, the erythroblasts differentiated from RNP treated CD34+ cells maintained the kinetics of differentiation observed for donor matched untreated control cells as determined by flow analysis for acquisition of erythroid phenotype (% Glycophorin A+ cells) (FIG. 6B). These data indicate that targeted disruption of HBG1/HBG2 proximal promoter region supported an increase in HBG expression in erythroid progeny of RNP treated adult hematopoietic stem/progenitor cells without altering differentiation potential.

### Example 4: Cas9 RNP Targeting the HPFH Mutation Supports Gene Editing in Human Adult Mobilized Peripheral Blood Hematopoietic Stem/Progenitor Cells with Increased HBG Expression in Erythroblast Progeny

[0443] To determine whether co-delivery of paired nickase RNPs targeting HBG would increase targeted disruption of the proximal HBG promoter, mPB CD34+ cells were cultured for 2 days with human cytokines and PGE2 in StemSpan SFEM and then electroporated with S. pyogenes D10A Cas9 protein precomplexed to two gRNAs that target sites flanking the site of the 13 nt deletion. The targeting domain sequences for gRNAs used in nickase pairs in this example (including, without limitation, SpA, Sp85 and SpB) are presented in Table 7. D10A nickase pairs were selected such that the PAMs for the targets were oriented outward and the distance between the cut sites were <100 nt. gRNAs were complexed with D10A Cas9 protein to form RNP complexes and then human CD34+ cells and paired nickase were subject to electroporation. To determine whether co-delivery of an ssODN that encoded the 13 nt deletion would increase editing and introduction of the mutation into the cells, in some experiments, ssODN1 was added to the cell RNP mixture prior to electroporation. Approximately 3 days after electroporation, gDNA was extracted from the RNP treated cells and analyzed by T7E1 endonuclease assay and/or Sanger DNA sequencing of HBG2 PCR products amplified from the extracted gDNA. Of the three D10A nickase pairs tested, indels detected by T7E1 endonuclease analysis were increased for one nickase pair (gRNAs SpA+Sp85) samples for which ssODN1 was included (FIG. 7A). DNA sequencing analysis was performed on limited samples shown in FIG. 7A. DNA sequencing analysis showed up to ˜27% indels at the target site, with insertions as the dominant indel detected, followed by deletions of the targeted region (area between the cut sites of the paired nickases), and the 13 nt deletion mutation was also detected at a frequency of 2-3% when ssODN1 encoding the deletion was co-delivered (FIG. 7B). Silent, non-pathogenic SNPs were included in the ssODN1 donor template, and were detected in the sequences that contained the 13 nt deletion, indicating that creation of the HFPH mutation occurred through an HDR event.

### Example 5: D10A Paired RNPs Electroporated into Adult CD34+ Cells Supports Induction of HbF Protein in Erythroid Progeny

[0444] To further optimize editing conditions in mPB CD34+ cells at the target site and to evaluate editing in additional human cell donors, human mPB CD34+ cells were electroporated with D10A Cas9 and WT Cas9 paired RNPs targeting HBG. The most efficient guide pair for both D10A Cas9 and WT Cas9 RNPs was Sp37+SpA, which supported >30% indels as determined by T7E1 endonuclease analysis of HBG2 PCR products (FIG. 8A). Given that editing at both HBG1 and HBG2 could result in large deletions of HBG2 and the intergenic region between HBG2 and HBG1, indels were further characterized in order to capture local indels by T7E1 endonuclease assay and sequencing and large deletion by ddPCR analysis. Large deletions were detected in all samples at variable frequencies for both D10A Cas9 and WT Cas9 RNP nickase pairs (FIG. 8B). Illumina sequencing analysis of indels correlated with indels determined by T7E1 analysis (FIG. 8C-8D).

[0445] To determine whether CD34+ cells edited with dual nickases at the HBG promoter gave rise to erythroid progeny with elevated HbF expression, donor matched RNP treated and untreated controls were induced toward erythroid differentiation and then evaluated for maintenance of indels during differentiation and for expression of HbF mRNA and protein. The level of editing (as determined by T7E1 endonuclease assay) was evaluated over the first 2 weeks of erythroid differentiation in the progeny of RNP treated cells prior to enucleation. Indels were detected in the erythroid progeny at every time point assayed suggesting that the editing that occurred in the CD34+ cells was maintained during erythroid differentiation and that edited CD34+ cells maintain erythroid differentiation potential.

[0446] The levels of HBG mRNA (day 10 of differentiation) and HbF protein (day 20-23 of differentiation) were quantified by ddPCR and HPLC analysis (according to the HPLC method described in Chang 2017 at pp. 143-44, incorporated by reference herein), respectively (FIG. 9). A ˜2-fold increase (+40% in in HBG transcripts vs. unedited donor matched control) was observed for HBG:HBA ratio (data not shown) and the ratio of HbF/HbF+HbA (i.e. HBG mRNA HGB+HBB mRNA) increased to 30% above the level detected in donor matched untreated control samples.

[0447] For the D10A Cas9 nickase pairs, upregulation of HbF mRNA and protein was detected in erythroid progeny (FIG. 9). With respect to HbF protein analysis, two pairs supported 20% HbF induction for two D10A nickase pairs. No HbF upregulation was detected in erythroid progeny of WT Cas9 RNP treated CD34+ cells (data not shown).

### Example 6: Increasing the Dose of RNP Increases Total Editing Efficiency in Human Adult CD34+ Cells at the HBG Locus

[0448] The concentration of D10A Cas9 RNP for the nickase pair SpA+Sp85 was increased (2.5 μM standard concentration and 3.7 μM) and delivered to mPB CD34+ cells by electroporation. The increased RNP concentration supported an increase in indels at the HBG target site to >30% (FIG. 10A) as determined by T7E1 endonuclease analysis of the HBG PCR product amplified for gDNA extracted 3 days after electroporation of CD34+ cells. Sequencing analysis indicated that increasing the RNP concentration increased insertions (FIG. 10B). Erythroid progeny of RNP treated CD34+ cells also had an increase in HbF protein production (FIG. 10C). Importantly, the hematopoietic colony forming potential was maintained after editing (FIG. 10D). These cells were then transplanted into immunodeficient mice and their engraftment 1 month (FIG. 10E) and 2 months (FIG. 10F) after transplantation was evaluated by sampling the peripheral blood and measuring the percentage of human CD45+ cells. Early engraftment data showed no difference in engraftment between recipient cohorts of donor matched untreated controls (0 μM RNP) and mice transplanted with RNP treated cells. Furthermore, there was no difference in human blood lineage distribution (myeloid, B cell, T cell) within the human CD45+ fraction among cohorts at indicated time points (FIG. 10G-H).

[0449] Two additional D10A nickase pairs were also tested in RNP dose response studies in adult mPB CD34+ cells (Sp37+SpA, Sp37+SpB). Here, mPB CD34+ cells were electroporated with D10A paired nickases delivered at 0, 2.5, and 3.75 μM of total RNP. RNP treated cells were differentiated into erythroid progeny and the HbF protein levels (% HbF/HbF+HbA) were analyzed by HPLC analysis. The indel frequency detected in CD34+ cells was plotted with the HbF levels detected in erythroid progeny in order to correlate editing and HbF induction (FIG. 11A). RNP treated and untreated control mPB CD34+ cells were also differentiated into colonies to evaluate ex vivo hematopoietic activity. Colony forming cell (CFC) activity was maintained for the progeny of RNP treated and donor matched untreated control CD34+ cells (FIG. 11B). There was no difference in the percentage of human CD45+ cells in the mouse peripheral blood 1 month after transplantation and no difference in blood lineage distribution (FIG. 11C-D) for cells exposed to different D10A RNP pairs at different doses compared to untreated donor matched control CD34+ cells.

### Example 7: Co-Delivery of RNP Targeting the Erythroid Specific Enhancer of BCL11A and a Non-Specific (N) Single Strand Deoxynucleotide Sequence or Paired RNPs Increases Gene Editing in Human CD34+ Cells and Supports Induction of Fetal Hemoglobin Expression in Erythroid Progeny

[0450] Fetal hemoglobin expression can be induced through targeted disruption of the erythroid cell specific expression of a transcriptional repressor, BCL11A (Canvers 2015). One potential strategy to increase HbF expression through a gene editing strategy is to multiplex gene editing for introduction of 13 nt deletion associated in the HBG proximal promoter and also for targeted disruption of the GATA1 binding motif in the erythroid specific enhancer of BCL11A that is in the +58 DHS region of intron 2 of the BCL11A gene (FIG. 12). In order to accomplish this multiplex strategy to increase HbF expression through multiplex gene editing, the effect of disruption of BCL11A erythroid enhancer (BCL11Ae) must first be determined as a single editing event.

[0451] In this experiment, CB CD34+ cells were electroporated with S. pyogenes WT Cas9 complexed to in vitro transcribed sgRNA targeting the GATA 1 motif in the +58 DHS region of intron 2 of BCL11A gene (gRNA SpK, Table 9) (FIG. 13A). To determine whether co-delivery of a non-target specific ssODN would increase editing of the target sequence, BCL11Ae RNP was co-delivered with ssODN (which is nonhomologous to the BCL11Ae target sequence) in CB CD34+ cells. T7E1 analysis of BCL11A erythroid enhancer PCR product from gDNA extracted from CB CD34+ cells treated with BCL11Ae RNP indicated that ˜5% indels was achieved (FIG. 13A). Co-delivery of BCL11Ae RNP with a non-target specific ssODN increase in indels by 5-fold to 20% as detected by T7E1 endonuclease analysis. Illumina sequencing analysis indicated that >90% of edits had disruption of the GATA1 motif in the +DHS 58 region enhancer in intron 2 of the BCL11A gene (data not shown). To increase editing, human CB CD34+ cells were electroporated with WT Cas9 RNP (single gRNAs complexed to WT Cas9) or with WT Cas9 paired RNPs (paired gRNAs complexed to WT Cas9), so that the cut sites in each pair flank the target site for excision of the GATA1 motif (gRNAs SpC, SpK, SpM, SpN) (Table 9). Two of the single gRNAs and two pairs had >50% indels as determined by T7E1 endonuclease analysis (FIG. 13B).

TABLE 9
Select gRNA sequences targeting BCL11A erythroid
enhancer for screening in CD34⁺ cells

| | | | Targeting | Targeting | |
|---|---|---|---|---|---|
| | Targeting | Targeting | domain | domain | |
| | domain | domain | sequence | sequence | |
| gRNA | sequence | sequence | plus PAM | plus PAM | |
| ID | (RNA) | (DNA) | (NGG)(RNA) | (NGG)(DNA) | Sense |
| SpK | CUAACAGUUG | CTAACAGTTG | CUAACAGUUGCU | CTAACAGTTGCT | Antisense |
| | CUUUUAUCAC | CTTTTATCAC | UUUAUCACAGG | TTTATCACAGG | |
| | (SEQ ID NO: 952) | (SEQ ID NO: 956) | (SEQ ID NO: 960) | (SEQ ID NO: 964) | |
| SpM | GGGCGUGGGU | GGGCGTGGGT | GGGCGUGGGUGG | GGGCGTGGGTGG | Antisense |
| | GGGGUAGAAG | GGGGTAGAAG | GGUAGAAGAGG | GGTAGAAGAGG | |
| | (SEQ ID NO: 953) | (SEQ ID NO: 957) | (SEQ ID NO: 961) | (SEQ ID NO: 965) | |
| SpN | CUCUUAGACA | CTCTTAGACA | CUCUUAGACAUA | CTCTTAGACATA | Antisense |
| | UAACACACCA | TAACACACCA | ACACACCAGGG | ACACACCAGGG | |
| | (SEQ ID NO: 954) | (SEQ ID NO: 958) | (SEQ ID NO: 962) | (SEQ ID NO: 966) | |
| SpC | AUCAGAGGCC | ATCAGAGGCC | AUCAGAGGCCAA | ATCAGAGGCCAA | Sense |
| | AAACCCUUCC | AAACCCTTCC | ACCCUUCCUGG | ACCCTTCCTGG | |
| | (SEQ ID NO: 955) | (SEQ ID NO: 959) | (SEQ ID NO: 963) | (SEQ ID NO: 967) | |

[0452] Next, human adult bone marrow CD34+ cells were electroporated with the BCL11Ae RNP. DNA sequencing analysis of the BCL11A PCR product amplified from gDNA extracted from marrow CD34+ cells indicated 15% gene editing comprised of insertions and deletions (FIG. 14A). Importantly, all deletions resulted in deletion of the GATA1 motif and all insertions disrupted GATA1 motif through addition of a small number of bp in the motif. CD34+ cells were plated into colony forming assays and the mixed hematopoietic colonies (GEMMs), which correspond to CD34+ cell clones, were picked. gDNA was isolated and analyzed by Illumina sequencing to quantify monoallelic and biallelic disruption of the target site. Most GEMMs differentiated from the CD34+ cell clones had monoallelic disruption and biallelic disruption was also detected, with the overall indel rate −2/3 higher compared to what was detected in the bulk CD34+ cell population (FIG. 14B). This was likely a reflection of the percentage of common myeloid progenitors (CMPs) that give rise to GEMMs that make up a larger fraction of the heterogenous CD34+ cells versus the other lineages present, but not captured/differentiated in the short-term CFC assays. The RNP treated marrow CD34+ cells also maintained similar kinetics of erythroid maturation (enucleation, FIG. 14C) and differentiation (phenotype acquisition, FIG. 14D) compared to donor matched untreated control cells. Erythroid progeny of edited marrow CD34+ cells exhibited −5-fold increase in HbF induction as determined by flow cytometry analysis (FIG. 14E).

[0453] Gene editing and induction of fetal hemoglobin was also evaluated in human adult mPB CD34+ cells. Co-delivery of BCL11Ae RNP and nonspecific ssODN supported ˜20% indels at the target site (FIG. 15A). To evaluate early induction of fetal hemoglobin in erythroid progeny of edited cells, mPB CD34+ cells were differentiated into erythroblasts and induction of fetal hemoglobin transcription (HBG mRNA) was evaluated by qRT-PCR analysis. The erythroid progeny of BCL11Ae RNP treated CD34+ cells exhibited a 2-fold induction of HBG mRNA compared to untreated controls, suggesting induction of fetal hemoglobin expression (FIG. 15B). The RNP treated marrow CD34+ cells also maintained similar kinetics of differentiation (phenotype acquisition, FIG. 15C) compared to donor matched untreated control cells.

### Example 8: Electroporation of Cas9 RNP Targeting the Distal CCAAT Box at the HBG Promoter in Human Hematopoietic Stem/Progenitor Cells Generates Several Deletions that Promote HBG Expression after Erythroid Differentiation

[0454] Hereditary persistence of fetal hemoglobin (HPFH phenotype) is observed in patients carrying a 13 nt deletion overlapping with the HBG distal CCAAT box. Cas9-RNP targeting the HBG distal CCAAT box can be used in hematopoietic stem/progenitor cells (HSPCs) to reproduce the HPFH phenotype, likely by disrupting the binding sites of transcription factors repressing HBG expression. DNA double strand breaks (DSBs) created by Cas9 RNP can lead to a variety of repair outcomes, including insertions and deletions proximal to the RNP cut site. Some of the introduced indels may disrupt the binding of repressing factors less efficiently. It was envisioned that ssODN donor templates could be used to improve the frequency of indels reproducing the HPFH phenotype by directing the repair towards specific deletions that leads to HBG gene expression.

[0455] To evaluate the repair outcome of Cas9-RNP targeting the distal CCAAT box at the HBG promoter, Cas9 was complexed with the chemically synthesized guide RNA OLI7066 (SEQ ID NO:970, Table 10) (“OLI7066-RNP”) and RNP were electroporated into HSPCs at 16 μM. Sequencing analysis (next generation sequencing) performed at day 2 post-electroporation indicated that 23.7% of the alleles carried the 13 nt deletion identical to the naturally occurring HPFH mutation (FIG. 16, 13 nt deletion indicated by “Δ−102:−114”). Several other frequent deletions were also observed around the OLI7066-RNP cut site (FIG. 16).

TABLE 10
Sequences of chemically synthesized
gRNA targeting the CCAAT box, with
or without end modifications.

| | | gRNA | gRNA |
|---|---|---|---|
| Name | Oli-ID | sequence (RNA) | sequence (DNA) |
| Sp35 | OLI7066 | CUUGUCAAGGCUAUUG | CTTGTCAAGGCTATTG |
| unmod- | | GUCAGUUUUAGAGCUA | GTCAGTTTTAGAGCTA |
| ified | | GAAAUAGCAAGUUAAA | GAAATAGCAAGTTAAA |
| | | AUAAGGCUAGUCCGUU | ATAAGGCTAGTCCGTT |
| | | AUCAACUUGAAAAAGU | ATCAACTTGAAAAAGT |
| | | GGCACCGAGUCGGUGC | GGCACCGAGTCGGTGC |
| | | UUUU | TTTT |
| | | (SEQ ID NO: 970) | (SEQ ID NO: 972) |
| Sp35 | OLI8394 | mC*mU*mU*GUCAAGG | mC*mT*mT*GTCAAGG |
| 5′-3′ | | CUAUUGGUCAGUUUUA | CTATTGGTCAGTTTTA |
| PSOMe | | GAGCUAGAAAUAGCAA | GAGCTAGAAATAGCAA |
| | | GUUAAAAUAAGGCUAG | GTTAAAATAAGGCTAG |
| | | UCCGUUAUCAACUUGA | TCCGTTATCAACTTGA |
| | | AAAAGUGGCACCGAGU | AAAAGTGGCACCGAGT |
| | | CGGUGCmU*mU*mU*U | CGGTGCmT*mT*mT*T |
| | | (SEQ ID NO: 971) | (SEQ ID NO: 973) |

*: Represents phosphorothioate modification
m: Represents 2-o-methyl modification

[0456] A single cell experiment was performed to evaluate the level of HbF expression induced by the most frequent deletions generated by delivery of RNP (Cas9 complexed with the gRNA OLI7066 (SEQ ID NO:970) (“OLI7066-RNP”)) targeting the distal CCAAT box. Briefly, single HSPC electroporated with OLI7066-RNP complexes targeting the distal CCAAT box were plated in single wells and differentiated into erythroid cells by culturing for 18 days in the presence of human cytokines (erythropoietin, SCF, IL3), human plasma (Octoplas), and other supplements (hydrocortisone, heparin, transferrin, insulin). A fraction of the erythroid progeny from each single cell was split after 14 days for gDNA extraction. Sequencing analysis of the PCR product from HBG1 and HBG2 was performed to identify the genotype of each clonal population. ddPCR analysis was also performed on the genomic DNA of each clonal populations to detect deletions of the 4.9 kb fragment between the guide RNA target sites in HBG1 and HBG2. At day 18, the erythroid cells deriving from each clone were lysed and the relative expression of the globin chains was determined by ultra-performance liquid chromatography (UPLC). Finally, the level of G-gamma (Gγ)-globin, A-gamma (Aγ)-globin chain expression (or AG-gamma (AGγ)-globin resulting from the 4.9 kb deletion) as determined by [gamma chain]/[all-gamma chains+beta chain] was compared relative to the indels carried at HBG1 and HBG2 respectively. The 13 nt deletion that reproduces the HPFH genotype was shown to induce HBG expression. In addition several unique non-naturally occurring deletions that induced HBG expression at comparable levels were identified. These include HBG Δ−112:−115 (“4 nt deletion”), HBG Δ−104:−121 (“18 nt deletion”), HBG Δ−116 (“1 nt deletion”) (FIGS. 17A-D).

### Example 9: Co-Delivery of Cas9 RNP Targeting the Region at or Near the Distal CCAAT Box with ssODN Donors Supports Precise Gene Editing in Human Hematopoietic Stem/Progenitor Cells and Increased Gamma-Globin Expression in the Erythroid Progeny

[0457] To improve the frequency of HbF inducing indels in HSPC, single strand deoxynucleotide donor repair templates (ssODNs) “encoding” identified HbF inducing deletions (e.g., the “Int” (HBG Δ−116) and “4 nt” (HBG Δ−112:−115) deletions) were designed (FIG. 18). ssODNs used to induce these deletions were as follows: “Int” ssODNs: OLI16417-18; “4 nt” ssODNs: OLI16424, OLI16430, Table 11). ssODNs were designed with 90 nt homology arms flanking this absent sequence to create a perfect deletion. The ssODNs were modified to contain phosphorothioates (PhTx) at the 5′ and 3′ ends. Additional ssODNs were designed to encode naturally occurring mutations observed in patients with HPFH (e.g., HBGΔ−102:−114 (“13 nt” deletion, FIG. 18) and HBG-117 G>A mutation (“HBG-117 G>A”). ssODNs used to induce these deletions were as follows: “13 nt” ssODN: OLI16412, OLI16414 and “−117 G>A” ssODN: OLI16415-16, Table 11). Finally, to facilitate the evaluation of gene correction, ssODNs (OLI16411, OLI16413, Table 11) were designed to encode an 11 nt deletion overlapping the distal CCAAT box that occurs at low frequency after electroporation of OLI8394-RNP alone (0.1%, see FIG. 19B, FIG. 18).

TABLE 11
Single strand deoxynucleotide donor repair
templates “encoding” deletions or mutations
at or near the CCAAT box

| ssODN ID | OLI-ID | Sequence |
|---|---|---|
| Ptx ssODN- | OLI16409 | G*GTGCTTCCTTTTATTCTTCATCCCTAGCCAGCCGCCGGCCCC |
| Positive | | TGGCCTCACTGGATACTCTAAGACTATTGGTCAAGTTTGCCTT |
| Strand −18 nt | | GTCAAGGCTGGCCAACCCATGGGTGGAGTTTAGCCAGGGACC |
| (180) | | GTTTCAGACAGATATTTGCATTGAGATAGTGTGGGGAAGGGG |
| | | CCCCCAAGA*G (SEQ ID NO: 974) |
| Ptx ssODN- | OLI16410 | C*TCTTGGGGGCCCCTTCCCCACACTATCTCAATGCAAATATC |
| Negative | | TGTCTGAAACGGTCCCTGGCTAAACTCCACCCATGGGTTGGCC |
| Strand −18 nt | | AGCCTTGACAAGGCAAACTTGACCAATAGTCTTAGAGTATCC |
| (180) | | AGTGAGGCCAGGGGCCGGCGGCTGGCTAGGGATGAAGAATA |
| | | AAAGGAAGCAC*C (SEQ ID NO: 975) |
| Ptx ssODN- | OLI16411 | G*GCCCCTTCCCCACACTATCTCAATGCAAATATCTGTCTGAA |
| Negative | | ACGGTCCCTGGCTAAACTCCACCCATGGGTTGGCCAGCCTTGC |
| Strand −11 nt | | CTTGAGACAAGGCAAACTTGACCAATAGTCTTAGAGTATCCA |
| (180) | | GTGAGGCCAGGGGCCGGCGGCTGGCTAGGGATGAAGAATAA |
| | | AAGGAAGCACC*C (SEQ ID NO: 976) |
| Ptx ssODN- | OLI16412 | G*GCCCCTTCCCCACACTATCTCAATGCAAATATCTGTCTGAA |
| Negative | | ACGGTCCCTGGCTAAACTCCACCCATGGGTTGGCCAGCCTTGC |
| Strand −13 nt | | CTTGACAAGGCAAACTTGACCAATAGTCTTAGAGTATCCAGT |
| (180) | | GAGGCCAGGGGCCGGCGGCTGGCTAGGGATGAAGAATAAAA |
| | | GGAAGCACCCT*T (SEQ ID NO: 977) |
| Ptx ssODN- | OLI16413 | G*GGTGCTTCCTTTTATTCTTCATCCCTAGCCAGCCGCCGGCCC |
| Positive | | CTGGCCTCACTGGATACTCTAAGACTATTGGTCAAGTTTGCCT |
| Strand −11 nt | | TGTCTCAAGGCAAGGCTGGCCAACCCATGGGTGGAGTTTAGC |
| (180) | | CAGGGACCGTTTCAGACAGATATTTGCATTGAGATAGTGTGG |
| | | GGAAGGGGC*C (SEQ ID NO: 978) |
| Ptx ssODN- | OLI16414 | A*AGGGTGCTTCCTTTTATTCTTCATCCCTAGCCAGCCGCCGGC |
| Positive | | CCCTGGCCTCACTGGATACTCTAAGACTATTGGTCAAGTTTGC |
| Strand −13 nt | | CTTGTCAAGGCAAGGCTGGCCAACCCATGGGTGGAGTTTAGC |
| (180) | | CAGGGACCGTTTCAGACAGATATTTGCATTGAGATAGTGTGG |
| | | GGAAGGGGC*C (SEQ ID NO: 979) |
| Ptx ssODN- | OLI16415 | G*GCCCCTTCCCCACACTATCTCAATGCAAATATCTGTCTGAA |
| Negative | | ACGGTCCCTGGCTAAACTCCACCCATGGGTTGGCCAGCCTTGC |
| Strand 117: | | CTTAACCAATAGCCTTGACAAGGCAAACTTGACCAATAGTCTT |
| G > A (180) | | AGAGTATCCAGTGAGGCCAGGGGCCGGCGGCTGGCTAGGGAT |
| | | GAAGAATAA*A (SEQ ID NO: 980) |
| Ptx ssODN- | OLI16416 | T*TTATTCTTCATCCCTAGCCAGCCGCCGGCCCCTGGCCTCACT |
| Positive | | GGATACTCTAAGACTATTGGTCAAGTTTGCCTTGTCAAGGCTA |
| Strand 117: | | TTGGTTAAGGCAAGGCTGGCCAACCCATGGGTGGAGTTTAGC |
| G > A (180) | | CAGGGACCGTTTCAGACAGATATTTGCATTGAGATAGTGTGG |
| | | GGAAGGGGC*C (SEQ ID NO: 981) |
| Ptx ssODN- | OLI16417 | G*GCCCCTTCCCCACACTATCTCAATGCAAATATCTGTCTGAA |
| Negative | | ACGGTCCCTGGCTAAACTCCACCCATGGGTTGGCCAGCCTTGC |
| Strand −1 nt | | CTTGCCAATAGCCTTGACAAGGCAAACTTGACCAATAGTCTTA |
| (180) | | GAGTATCCAGTGAGGCCAGGGGCCGGCGGCTGGCTAGGGATG |
| | | AAGAATAAA*A (SEQ ID NO: 982) |
| Ptx ssODN- | OLI16418 | T*TTTATTCTTCATCCCTAGCCAGCCGCCGGCCCCTGGCCTCAC |
| Positive | | TGGATACTCTAAGACTATTGGTCAAGTTTGCCTTGTCAAGGCT |
| Strand −1 nt | | ATTGGCAAGGCAAGGCTGGCCAACCCATGGGTGGAGTTTAGC |
| (180) | | CAGGGACCGTTTCAGACAGATATTTGCATTGAGATAGTGTGG |
| | | GGAAGGGGC*C (SEQ ID NO: 983) |
| Ptx ssODN- | OLI16419 | T*GGCTAAACTCCACCCATGGGTTGGCCAGCCTTGCCTTGATA |
| Negative | | GCCTTGACAAGGCAAACTTGACCAATAGTCTTAGAGTATCCA |
| Strand −4 nt | | GTGAGGCCAGGGGCCGGCGGCTGGCTAGGGATGAA*G (SEQ |
| 40/80 (120) | | ID NO: 984) |
| Ptx ssODN- | OLI16420 | C*CACCCATGGGTTGGCCAGCCTTGCCTTGATAGCCTTGACAA |
| Negative | | GGCAAACTTGACCAATAGTCTTAGAGTATCCAGTGAGGCCAG |
| Strand −4 nt | | GGGCCGGCGGCTGGC*T (SEQ ID NO: 985) |
| 30/70 (100) | | |
| Ptx ssODN- | OLI16421 | A*AACGGTCCCTGGCTAAACTCCACCCATGGGTTGGCCAGCCT |
| Negative | | TGCCTTGATAGCCTTGACAAGGCAAACTTGACCAATAGTCTTA |
| Strand −4 nt | | GAGTATCCAGTGAG*G (SEQ ID NO: 986) |
| (100) | | |
| Ptx ssODN- | OLI16422 | T*ATCTGTCTGAAACGGTCCCTGGCTAAACTCCACCCATGGGT |
| Negative | | TGGCCAGCCTTGCCTTGATAGCCTTGACAAGGCAAACTTGACC |
| Strand −4 nt | | AATAGTCTTAGAGTATCCAGTGAGGCCAGGGGCC*G (SEQ ID |
| (120) | | NO: 987) |
| Ptx ssODN- | OLI16423 | T*CAATGCAAATATCTGTCTGAAACGGTCCCTGGCTAAACTCC |
| Negative | | ACCCATGGGTTGGCCAGCCTTGCCTTGATAGCCTTGACAAGGC |
| Strand −4 nt | | AAACTTGACCAATAGTCTTAGAGTATCCAGTGAGGCCAGGGG |
| (140) | | CCGGCGGCTGGC*T (SEQ ID NO: 988) |
| Ptx ssODN- | OLI16424 | G*GCCCCTTCCCCACACTATCTCAATGCAAATATCTGTCTGAA |
| Negative | | ACGGTCCCTGGCTAAACTCCACCCATGGGTTGGCCAGCCTTGC |
| Strand −4 nt | | CTTGATAGCCTTGACAAGGCAAACTTGACCAATAGTCTTAGA |
| (180) | | GTATCCAGTGAGGCCAGGGGCCGGCGGCTGGCTAGGGATGAA |
| | | GAATAAAAGG*A (SEQ ID NO: 989) |
| Ptx ssODN- | OLI16425 | T*ACTCTAAGACTATTGGTCAAGTTTGCCTTGTCAAGGCTATC |
| Positive | | AAGGCAAGGCTGGCCAACCCATGGGTGGAGTTTAGCCAGGGA |
| Strand −4 nt | | CCGTTTCAGACAGATATTTGCATTGAGATAGTGTG*G (SEQ ID |
| 40/80 (120) | | NO: 990) |
| Ptx ssODN- | OLI16426 | C*TATTGGTCAAGTTTGCCTTGTCAAGGCTATCAAGGCAAGGC |
| Positive | | TGGCCAACCCATGGGTGGAGTTTAGCCAGGGACCGTTTCAGA |
| Strand −4 nt | | CAGATATTTGCATTG*A (SEQ ID NO: 991) |
| 30/70 (100) | | |
| Ptx ssODN- | OLI16427 | C*CTCACTGGATACTCTAAGACTATTGGTCAAGTTTGCCTTGTC |
| Positive | | AAGGCTATCAAGGCAAGGCTGGCCAACCCATGGGTGGAGTTT |
| Strand −4 nt | | AGCCAGGGACCGTT*T (SEQ ID NO: 992) |
| (100) | | |
| Ptx ssODN- | OLI16428 | C*GGCCCCTGGCCTCACTGGATACTCTAAGACTATTGGTCAAG |
| Positive | | TTTGCCTTGTCAAGGCTATCAAGGCAAGGCTGGCCAACCCATG |
| Strand −4 nt | | GGTGGAGTTTAGCCAGGGACCGTTTCAGACAGAT*A (SEQ ID |
| (120) | | NO: 993) |
| Ptx ssODN- | OLI16429 | A*GCCAGCCGCCGGCCCCTGGCCTCACTGGATACTCTAAGACT |
| Positive | | ATTGGTCAAGTTTGCCTTGTCAAGGCTATCAAGGCAAGGCTGG |
| Strand −4 nt | | CCAACCCATGGGTGGAGTTTAGCCAGGGACCGTTTCAGACAG |
| (140) | | ATATTTGCATTG*A (SEQ ID NO: 994) |
| Ptx ssODN- | OLI16430 | T*CCTTTTATTCTTCATCCCTAGCCAGCCGCCGGCCCCTGGCCT |
| Positive | | CACTGGATACTCTAAGACTATTGGTCAAGTTTGCCTTGTCAAG |
| Strand −4 nt | | GCTATCAAGGCAAGGCTGGCCAACCCATGGGTGGAGTTTAGC |
| (180) | | CAGGGACCGTTTCAGACAGATATTTGCATTGAGATAGTGTGG |
| | | GGAAGGGGC*C (SEQ ID NO: 995) |
| Ptx ssODN- | OLI16431 | C*CCTGGCCTCACTGGATACTCTAAGACTATTGGTCAAGTTTG |
| Positive | | CCTTGTCAAGGCTGGCCAACCCATGGGTGGAGTTTAGCCAGG |
| Strand −18 nt | | GACCGTTTCAGACAG*A (SEQ ID NO: 1040) |
| (100) | | |

*: Represents phosphorothioate modification

[0458] The ssODN donors, OLI16409-OLI16418, OLI16424 and OLI16430 (Table 11), were co-delivered to adult mPB CD34+ cells with Cas9 protein precomplexed to OLI8394 (“OLI8394-RNP”) or Cas9 protein precomplexed to OLI7066 (“OLI7066-RNP”) targeting the HBG distal CCAAT box (Table 10). Briefly, mPB CD34+ cells were pre-stimulated for 2 days with human cytokines in X-Vivo-10 and then electroporated with a mixture composed of an ssODN donor at 2.5 μM and OLI8394-RNP or OLI7066-RNP at 2 μM. After three days post electroporation the genomic DNA was extracted, and next-generation sequencing was performed on the HBG PCR products. The level of editing was increased from 62.1% when using OLI8394-RNP alone to up to 78.73% when co-delivering “−11” ssODN (i.e., OLI16411 or OLI16413) (FIG. 19A). The level of gene correction mediated by the co-delivery of the ssODN templates to human HSPC was shown to contribute to up to 42.4% of total indels as measured by the frequency of the “−11” deletion within total indels detected by sequencing of the HBG PCR product from HSPC electroporated with OLI8394-RNP+“11” ssODN (FIG. 19B). Efficient gene correction was observed across other ssODN templates and OLI8394-RNP (FIGS. 19C-E, G) or OLI7066-RNP (FIG. 19F).

[0459] The mPB CD34+ cells electroporated with OLI8394-RNP or OLI7066-RNP co-delivered with ssODN templates were differentiated into erythroid cells to evaluate the level of gamma-globin expression resulting from the gene editing. To determine whether co-delivering RNP with ssODNs increased the production of fetal hemoglobin in the erythroid progeny of edited adult CD34+ cells, the cells were differentiated into erythroid cells by culture for 18 days in the presence of human cytokines (erythropoietin, SCF, IL3), human plasma (Octoplas), and other supplements (hydrocortisone, heparin, transferrin, insulin). At day 18, the relative expression levels of gamma-globin chains over total beta-like globin chains (gamma chains/[gamma chains+beta chain]) was measured by UPLC. Up to 39.1% of gamma-globin was detected after co-delivery of ssODN instead of 29% when using OLI8394-RNP alone (FIGS. 20A-B).

[0460] The effect of the dose of ssODN was evaluated using ssODN OLI16424. mPB CD34+ cells were pre-stimulated for 2 days with human cytokines in X-Vivo-10 and then electroporated with a mixture composed of OLI16424-ssODN at doses ranging from 0.625 μM to 10 μM and OLI8394-RNP at 2 μM. After three days post electroporation the genomic DNA was extracted, and next-generation sequencing was performed on the HBG PCR products. Increasing the dose of ssODN up to 5 μM resulted in increased gene correction and reduced frequency of 4.9 kb deletions between HBG1 and HBG2 (as measured by ddPCR), while maintaining overall editing level and without affecting cell viability (FIGS. 21A-C). The level of gamma-globin increased up to 39.5% of total beta-like chains at the 5 μM dose of ssODN (FIG. 21D), as measured by UPLC analysis of the cell lysates after 18 days of erythroid culture.

[0461] The co-delivery of the OLI8394-RNP and the OLI16424 ssODN was further optimized by varying the relative dose of ssODN and RNP. mPB CD34+ cells were pre-stimulated for 2 days with human cytokines in X-Vivo-10 and then electroporated with a mixture composed of OLI16424-ssODN at doses ranging from 1.25 μM to 5 μM and OLI8394-RNP at 2 μM to 8 μM. After three days post electroporation the genomic DNA was extracted, and next-generation sequencing was performed on the HBG PCR products. An improved gene editing outcome, i.e., a lower frequency of 4.9 kb deletions between the HBG1 and HBG2 genes and a higher level of gene correction, was achieved with a lower RNP dose combined with a higher ssODN dose (FIG. 22A-C). This resulted in the highest level of gamma-globin expression after erythroid differentiation (FIG. 22D).

### Example 10: Gene Correction in Human Hematopoietic Stem/Progenitor Cells can be Achieved with Short ssODN Templates with Symmetrical and Asymmetrical Homology Arms

[0462] To determine whether gene correction could be achieved using templates shorter than the previously tested 180 nt lengths used in Example 9, ssODNs encoding the “4 nt” deletion (HBGΔ−112:−115) were designed and synthesized with shorter homology arms either symmetrical or asymmetrical relative to the deleted sequence (OLI16419-OLI16423, and OLI16425-OLI16429, Table 11, FIG. 23A). Briefly, mPB CD34+ cells were pre-stimulated for 2 days with human cytokines in X-Vivo-10 and then electroporated with a mixture composed of an ssODN donor (OLI16424, OLI16419 or OLI16421) at 2.5 μM and Cas9 protein precomplexed to OLI8394 (OLI8394-RNP) at 2 μM. After three days post electroporation the genomic DNA was extracted, and next-generation sequencing was performed on the HBG PCR products. Total editing and gene correction level were similar across ssODNs having symmetrical 90 nt homology arms, symmetrical 50 nt homology arms or 40/80 asymmetrical arms (FIG. 23B).

### Example 11: Co-Delivery of ssODN Donors with Paired D10A-Cas9 RNPs to Adult CD34+ Cells Supports Gene Correction at the HBG Distal CCAAT Box

[0463] To determine if ssODN-mediated gene correction to introduce CCAAT box disrupting deletions (such as, the “4 nt” deletion) in mPB CD34+ cells could be supported by D10A nickase pairs, CD34+ cells were electroporated with D10A Cas9 RNPs targeting HBG, with or without ssODN (OLI16424) (Table 11). Briefly, Sp37 and SpA gRNA were chemically synthesized (OLI7075 and OLI7074, respectively, Table 12) and complexed with D10A-Cas9 nickase mutant protein. Human adult mPB CD34+ cells were pre-stimulated for 48 h in medium supplemented with human cytokines. Next, the D10A-Cas9 RNP pair comprising Sp37+SpA (2 μM+2 μM) was delivered to the CD34+ cells, alone or in combination with OLI16424, and genomic DNA was extracted 3 days post-electroporation for Illumina sequencing analysis.

TABLE 12
gRNA sequences for targeting the
CCAAT box in CD34⁺ cells with D10A Cas9

| gRNA | | gRNA | gRNA |
|---|---|---|---|
| ID | OLI-ID | sequence (RNA) | sequence (DNA) |
| Sp37 | OLI17075 | CUUGACCAAUAGCCUU | CTTGACCAATAGCCTT |
| | | GACAGUUUUAGAGCUA | GACAGTTTTAGAGCTA |
| | | GAAAUAGCAAGUUAAA | GAAATAGCAAGTTAAA |
| | | AUAAGGCUAGUCCGUU | ATAAGGCTAGTCCGTT |
| | | AUCAACUUGAAAAAGU | ATCAACTTGAAAAAGT |
| | | GGCACCGAGUCGGUGC | GGCACCGAGTCGGTGC |
| | | UUUU | TTTT |
| | | (SEQ ID NO: 996) | (SEQ ID NO: 998) |
| SpA | OLI17074 | GGCAAGGCUGGCCAAC | GGCAAGGCTGGCCAAC |
| | | CCAUGUUUUAGAGCUA | CCATGTTTTAGAGCTA |
| | | GAAAUAGCAAGUUAAA | GAAATAGCAAGTTAAA |
| | | AUAAGGCUAGUCCGUU | ATAAGGCTAGTCCGTT |
| | | AUCAACUUGAAAAAGU | ATCAACTTGAAAAAGT |
| | | GGCACCGAGUCGGUGC | GGCACCGAGTCGGTGC |
| | | UUUU | TTTT |
| | | (SEQ ID NO: 997) | (SEQ ID NO: 999) |

[0464] Co-delivery of the ssODN supported ˜65% indels, instead of −51% when the D10A-Cas9 RNP pair was delivered alone, as determined by sequencing of the HBG PCR product from genomic DNA (FIG. 24). Detailed sequencing analysis also demonstrated that 16% of the alleles carried the precise 4 nt deletion (HBG:Δ−112:−115) when the OLI16424 ssODN donor was co-delivered, whereas this deletion was undetected when the RNP pair was delivered alone. This indicated that ˜25% of indels occurred by precise gene correction in the presence of the ssODN.

### Example 12: Cpf1 RNP Containing sRNA Targeting the CCAAT Box Supports Gene Editing in Human Hematopoietic Stem/Progenitor Cells

[0465] A Cpf1 guide RNA, HBG1-1 (i.e., OLI13620 (Table 13)), was designed to target the CCAAT box. To determine optimal nuclear localization signal configuration for Acidaminococcus sp. Cpf1 (“AsCpf1”) delivery in CD34+ cells, HBG1-1 gRNA was complexed to two nuclear localization signal (NLS) variants of AsCpf1, namely His-AsCpf1-nNLS (SEQ ID NO: 1000) and His-AsCpf1-sNLS-sNLS (SEQ ID NO:1001). “His” refers to a six-histidine purification sequence, “AsCpf1” refers to the Acidaminococcus sp. Cpf1 protein sequence, “nNLS” refers to the nucleoplasmin NLS, and “sNLS” refers to the SV40 NLS.

[0466] Briefly, mPB CD34+ cells were pre-stimulated for 2 days with human cytokines in X-Vivo-10 and then electroporated with the RNPs at 5 μM or 20 μM. The genomic DNA was extracted three days post electroporation and next-generation sequencing was performed on the HBG PCR products. HBG1-1 gRNA complexed to either of the Cpf1 NLS variants tested (“His-AsCpf1-sNLS-sNLS_HBG1-1 RNP” or “His-AsCpf1-nNLS_HBG1-1 RNP”), supported editing of CD34+ cells at the 13 nt target site. His-AsCpf1-sNLS-sNLS_HBG1-1 RNP generated 60.6% edited alleles and His-AsCpf1-nNLS_HBG1-1 RNP generated 51.1% edited alleles at the highest dose tested (FIG. 25A).

TABLE 13
HBG1-1 gRNA sequence for
targeting the CCAAT box in CD34⁺ cells

| | | | | Targeting | Targeting | |
|---|---|---|---|---|---|---|
| | | | | domain | domain | |
| | | Targeting | Targeting | sequence | sequence | |
| | | domain | domain | plus PAM | plus PAM | |
| gRNA | | sequence | sequence | (UUUG) | (TTTG) | |
| ID | OLI-ID | (RNA) | (DNA) | (RNA) | (DNA) | Sense |
| HBG1-1 | OLI13620 | CCUUGUC | CCTTGTC | UUUGCCU | TTTGCCT | Antisense |
| | | AAGGCUA | AAGGCTA | UGUCAAG | TGTCAAG | |
| | | UUGGUC | TTGGTC | GCUAUUG | GCTATTG | |
| | | (SEQ ID | (SEQ ID | GUC | GTC | |
| | | NO: 1002) | NO: 1003) | (SEQ ID | (SEQ ID | |
| | | | | NO: 1004) | NO: 1005) | |

### Example 13: Co-Delivery of Cpf1 RNP Targeting the CCAAT Box with ssODN Donors Supports Gene Editing in Human Hematopoietic Stem/Progenitor Cells

[0467] RNP comprising HBG1-1 gRNA complexed to the His-AsCpf1-sNLS-sNLS variant (“His-AsCpf1-sNLS-sNLS_HBG1-1 RNP”) were co-delivered by electroporation with single stranded oligodeoxynucleotide donor repair templates (ssODNs) to mPB CD34+ cells. As discussed in the examples above, OLI16430 and OLI16424 ssODNs were designed to “encode” a 4 nucleotide deletion and OLI16409 and OLI16410 ssODNs were designed to “encode” a 18 nucleotide deletion (Table 11). Both the 4 nt and 18 nt deletions disrupt the HBG distal CCAAT box and are associated with induction of HBG expression. The ssODNs include 90 nucleotide-long homology arms flanking the encoded absent sequence to create perfect deletion. The ssODNs were modified to contain phosphorothioates (PhTx) at the 5′ and 3′ ends (OLI16430, OLI16424, OLI16409, and OLI16410, Table 11). Briefly, human adult mPB CD34+ cells pre-stimulated for two days in medium supplemented with human cytokines were electroporated with 5 μM RNP comprising the His-AsCpf1-sNLS-sNLS protein complexed to HBG1-1 gRNA (“His-AsCpf1-sNLS-sNLS_HBG1-1 RNP”) either alone, or in combination with 2.5 μM of one of the ssODN donors (OLI16430, OLI164324, OLI16409, or OLI16410). Co-delivery of the RNP and ssODN donor encoding the 18 nt deletion with positive strand homology arms (OLI16409) enhanced the editing frequency from 39.5% without donor to 73.3%, as determined by sequencing analysis of the HBG PCR product from genomic DNA extracted at 72 hours post-electroporation (FIG. 26A).

[0468] Further analysis of the specific type and size of deletions at the target site revealed that in the presence of the 18 nt positive strand donor (OLI16409), 57.3% of alleles carried the 18 nt deletion compared to 7.5% of alleles when the His-AsCpf1-sNLS-sNLS_HBG1-1 RNP was delivered alone (FIG. 26B). The ssODN co-delivery mediated precise repair of the DNA DSB because the 18 nt deletion represented 71.2% of all the indels generated with co-delivery of ssODN OLI16409 and His-AsCpf1-sNLS-sNLS_HBG1-1 RNP, whereas the 18 nt deletion represented only 19.0% of all the indels were generated when delivering His-AsCpf1-sNLS-sNLS_HBG1-1 RNP alone (FIG. 26C).

[0469] Although the data in FIGS. 26A-26C originally suggested that codelivery of Cpf1 RNP with ssODN donors increased precise gene editing of genomic DNA resulting in the 18 nt deletion, subsequent testing repeating the experiment in Example 13 confirmed that these data were an artifact of the experiment. Nonetheless, data acquired from the subsequent repeated experiments testing the AsCpf1 RNP using the guide RNA HBG1-1 and ssODN OLI16409 indicated that codelivery of an ssODN donor supports increased total editing in human mPB-CD34+ cells, although not associated with precise repair of the DNA DSB toward the “−18 nt deletion” (see Example 21).

### Example 14: Cpf1 RNP Containing gRNA Targeting the Distal CCAAT Box Region of the HBG Promoter Supports Gene Editing in Human Hematopoietic Stem/Progenitor Cells which Promotes Induction of HbF Protein Expression in the Erythroid Progeny

[0470] Guide RNA HBG1-1 (Table 14) having a targeting domain comprising SEQ ID NO:1002 (Table 15), targets a site within the HBG promoter (FIG. 27A). The HBG1-1 gRNA (SEQ ID NO:1022) was complexed to wild-type AsCpf1 (AsCpf1-sNLS-sNLS, SEQ ID NO:1001) to form an RNP (“AsCpf1-HBG1-1-RNP”, Table 14). This complex (5 μM or 20 μM) was then electroporated into mobilized peripheral blood (mPB) derived CD34+ cells using either the Amaxa nucleofector (Lonza), or the MaxCyte GT (MaxCyte, Inc.) electroporation device. The level of insertions/deletions at the target site was analyzed by Illumina sequencing (NGS) of the PCR amplified target site three days after electroporation. AsCpf1-HBG1-1-RNP supported on-target editing of 43% and 17%, respectively, on the Amaxa and MaxCyte electroporation systems (FIGS. 28A (Amaxa) and 28B (MaxCyte)). Following the editing of mPB CD34+ cells, ex vivo differentiation into the erythroid linage was performed for 18 days (Giarratana 2011). Then, relative expression levels of gamma-globin chains (over total beta-like globin chains) was measured by UPLC (FIGS. 28A (Amaxa) and 28B (MaxCyte)). AsCpf1-HBG1-1-RNP led to an increase of gamma-globin expression by up to 21% above levels detected in cells derived from mock electroporated mPB CD34+ cells (FIG. 28A).

TABLE 14
RNP components

| | Protein | RNP | | gRNA | gRNA sequence |
|---|---|---|---|---|---|
| gRNA ID | variant | components | RNP ID | modification | (RNA) |
| HBG1-1 | AsCpf1- | gRNA + | HBG1-1- | Synthetic | UAAUUUCUACUC |
| gRNA | sNLS-sNLS | AsCpf1 WT | AsCpf1-RNP | unmodified | UUGUAGAUCCUU |
| | (SEQ ID | | | | GUCAAGGCUAUU |
| | NO: 1001) | | | | GGUC (SEQ ID |
| | | | | | NO: 1022) |
| HBG1-1 | His-AsCpf1- | gRNA + | HBG1-1- | Synthetic | UAAUUUCUACUC |
| gRNA | sNLS-sNLS | AsCpf1 | AsCpf1H800A- | unmodified | UUGUAGAUCCUU |
| | H800A | H800A | RNP | | GUCAAGGCUAUU |
| | (SEQ ID | | | | GGUC (SEQ ID |
| | NO: 1032) | | | | NO: 1022) |
| HBG1-1 | His-AsCpf1- | gRNA + | HBG1-1- | 5′OMe- | UAAUUUCUACUC |
| gRNA | sNLS-sNLS | AsCpf1 | AsCpf1H800A- | PS2OMe | UUGUAGAUCCUU |
| | H800A | H800A | RNP | | GUCAAGGCUAUU |
| | (SEQ ID | | | | GGmU/PS2/mC |
| | NO: 1032) | | | | (SEQ ID |
| | | | | | NO: 1041) |
| tSpA | SpCas9WT | dead gRNA + | tSpA-Cas9- | Synthetic 5′- | mG*mG*mC*UGG |
| dead | (SEQ ID | SpCas9 WT | RNP | 3′ 3xPSOMe | CCAACCCAUGU |
| gRNA | NO: 1033) | | | | UUUAGAGCUAG |
| | | | | | AAAUAGCAAGU |
| | | | | | UAAAAUAAGGC |
| | | | | | UAGUCCGUUAU |
| | | | | | CAACUUGAAAA |
| | | | | | AGUGGCACCGA |
| | | | | | GUCGGUGCmU* |
| | | | | | mU*mU*U |
| | | | | | (SEQ ID |
| | | | | | NO: 1024) |
| SpA | His-NLS- | gRNA + | SpA-D10A- | Synthetic 5′- | mG*mG*mC*AAG |
| gRNA | SpCas9D10A | SpCas9 | RNP | 3′ 3xPSOMe | GCUGGCCAACC |
| | (SEQ ID | nickase | | | CAUGUUUUAGA |
| | NO: 1034) | | | | GCUAGAAAUAG |
| | | | | | CAAGUUAAAAU |
| | | | | | AAGGCUAGUCC |
| | | | | | GUUAUCAACUU |
| | | | | | GAAAAAGUGGC |
| | | | | | ACCGAGUCGGU |
| | | | | | GCmU*mU*mU*U |
| | | | | | (SEQ ID |
| | | | | | NO: 1025) |
| SpG | His-NLS- | gRNA + | SpG-D10A- | Synthetic 5′- | mU*mA*mG*UCU |
| gRNA | SpCas9D10A | SpCas9 | RNP | 3′ 3xPSOMe | UAGAGUAUCCA |
| | (SEQ ID | nickase | | | GUGGUUUUAGA |
| | NO: 1034) | | | | GCUAGAAAUAG |
| | | | | | CAAGUUAAAAU |
| | | | | | AAGGCUAGUCC |
| | | | | | GUUAUCAACUU |
| | | | | | GAAAAAGUGGC |
| | | | | | ACCGAGUCGGU |
| | | | | | GCmU*mU*mU*U |
| | | | | | (SEQ ID |
| | | | | | NO: 1026) |
| Sp182 | SpCas9WT | dead gRNA + | Sp182-Cas9- | Synthetic 5′- | mU*mU*mA*GAG |
| dead | (SEQ ID | SpCas9 WT | RNP | 3′ 3xPSOMe | UAUCCAGUGGU |
| gRNA | NO: 1033) | | | | UUUAGAGCUAG |
| | | | | | AAAUAGCAAGU |
| | | | | | UAAAAUAAGGC |
| | | | | | UAGUCCGUUAU |
| | | | | | CAACUUGAAAA |
| | | | | | AGUGGCACCGA |
| | | | | | GUCGGUGCmU* |
| | | | | | mU*mU*U |
| | | | | | (SEQ ID |
| | | | | | NO: 1027) |

“His” refers to a six-histidine purification sequence
“AsCpf1” refers to the Acidaminococcus sp. Cpf1 protein sequence
“nNLS” refers to the nucleoplasmin NLS, and
“sNLS” refers to the SV40 NLS
“SpCas9” refers to the S. Pyogenes Cas9 protein sequence
“*” represents phosphorothioate modification
“PS” represents phosphorothioate modification
“PS2” represents phosphorodithioate modification
“OMe” represents a 2-o-methyl modification
“m” represents a 2-o-methyl modification

TABLE 15
Cpf1 guide RNA targeting sequences

| gRNA | gRNA Targeting domain | gRNA Targeting domain |
|---|---|---|
| ID | sequence (RNA) | sequence (DNA) |
| HBG1-1 | CCUUGUCAAGGCUAUUGGUC | CCTTGTCAAGGCTATTGGTC |
| gRNA | (SEQ ID NO: 1002) | (SEQ ID NO: 1003) |
| Sp182 | UUAGAGUAUCCAGUG | TTAGAGTATCCAGTG |
| dgRNA | (SEQ ID NO: 1028) | (SEQ ID NO: 1029) |
| SpG | UAGUCUUAGAGUAUCCAGUG | TAGTCTTAGAGTATCCAGTG |
| gRNA | (SEQ ID NO: 359) | (SEQ ID NO: 1030) |
| SpA | GGCAAGGCUGGCCAACCCAU | GGCAAGGCTGGCCAACCCAT |
| gRNA | (SEQ ID NO: 941) | (SEQ ID NO: 944) |
| tSpA | GGCUGGCCAACCCAU | GGCTGGCCAACCCAT |
| dgRNA | (SEQ ID NO: 326) | (SEQ ID NO: 1031) |

### Example 15: Cpf1 RNP Editing Efficiency at the CCAAT Box Region of the HBG Promoter is Enhanced when Co-Delivered with S. pyogenes Cas9 RNP with No Impact on Viability

[0471] It was hypothesized that the co-delivery of Cpf1-RNP with proximally targeting S. pyogenes Cas9 RNP, either catalytically inactive or introducing single nicks, could enhance editing levels at the target site. In an attempt to enhance Cpf1-RNP mediated editing at the distal CCAAT box region of the HBG promoter, HBG1-1-AsCpf1H800A-RNP (composed of His-AsCpf1-sNLS-sNLS-H800A (SEQ ID NO: 1032) complexed to HBG1-1 gRNA with a 3′ modification as shown in Table 14 (SEQ ID NO: 1041) was co-delivered into mPB CD34+ cells with: (1) S. pyogenes Cas9 D10A RNP containing a Cas9 D10A protein (His-NLS-SpCas9D10A, SEQ ID NO: 1034) complexed to a full length guide RNA (100mer) selected from: (a) SpA gRNA (Tables 14, 15; FIG. 27B) (“SpA-D10A-RNP”, Table 14) or (b) SpG gRNA (Tables 14, 15; FIG. 27C) (“SpG-D10A-RNP”, Table 14)); (2) S. pyogenes WT Cas9 RNP containing a WT Cas9 protein (SpCas9WT, SEQ ID NO: 1033) complexed to a truncated dead guide RNA (95mer—with a shortened protospacer region) selected from (a) tSpA dgRNA (Tables 14, 15; FIG. 27E) (“tSpA-Cas9-RNP”, Table 14); (b) Sp182 dgRNA (Tables 14, 15; FIG. 27F) (“Sp182-Cas9-RNP”, Table 14); or (c) tSpA-Cas9-RNP and Sp182-Cas9-RNP (Tables 14, 15, FIG. 27D). The RNP complexes were electroporated using the MaxCyte GT device (MaxCyte, Inc). The level of insertions/deletions at the target site was then analyzed by Illumina sequencing (NGS) of the PCR amplified target site three days after electroporation. In all combinations tested, irrespective of the S. pyogenes Cas9 enzyme used (D10A or WT) and of PAM orientation, total editing was increased above levels observed following Maxcyte delivery of HBG1-1-AsCpf1H800A-RNP alone (FIG. 29 and Table 16). In addition there was no detrimental effect on viability of mPB CD34+ cells when S. pyogenes Cas9 RNP were co-delivered (FIG. 30).

TABLE 16
Summary of indels and gamma globin expression with
each RNP combination at the maximum RNP dose tested

| | | | | Gamma Globin (over |
|---|---|---|---|---|
| Cpf1 RNP | Cas9 RNP1 | Cas9 RNP2 | Indels (NGS) | total beta-like chains) |
| — | — | — | 0% | 13.5% |
| HBG1-1- | — | — | 8.0% | 20.0% |
| AsCpf1H800A- | | | | |
| RNP | | | | |
| HBG1-1- | SpG-D10A- | — | 88.6% | 30.2% |
| AsCpf1H800A- | RNP | | | |
| RNP | | | | |
| HBG1-1- | SpA-D10A- | — | 42.6% | 32.5% |
| AsCpf1H800A- | RNP | | | |
| RNP | | | | |
| HBG1-1- | tSpA-Cas9-RNP | — | 32.2% | 19.8% |
| AsCpf1H800A- | | | | |
| RNP | | | | |
| HBG1-1- | Sp182-Cas9- | — | 85.4% | 42.8% |
| AsCpf1H800A- | RNP | | | |
| RNP | | | | |
| HBG1-1- | tSpA-Cas9-RNP | Sp182-Cas9- | 80.1% | 33.7% |
| AsCpf1H800A- | | RNP | | |
| RNP | | | | |

### Example 16: Cpf1 Editing Profile can be Manipulated with Co-Delivery of S. pyogenes Cas9-D10A-RNP

[0472] In addition to the increase in total editing observed when HBG1-1-AsCpf1H800A-RNP was co-delivered to mPB CD34+ cells with S. pyogenes Cas9-D10A-RNP (FIG. 29), changes to the indel profile were also observed. The introduction of a single strand break proximal to the Cpf1-RNP target site by the D10A enzyme (FIG. 31A) altered the directionality, length and/or position of the indels (FIG. 31B). For example, Sp182-D10A-RNP strongly shifted the profile toward the nicking site introduced by the D10A RNP, with deletions of various length extending from the Cpf1 cut site toward the upstream nicking site (Sp182-D10A-RNP, FIG. 31B). While the SpA-D10A-RNP also promoted the generation of deletions extending from the HBG1-1-AsCpf1H800A-RNP cut site to the nicking site introduced by the D10A enzyme (here located downstream), in this case, additional deletions apparently originating from the nicking site, but not extending fully to the HBG1-1-AsCpf1H800A-RNP cut site, were also produced (SpA-D10A-RNP, FIG. 31B).

[0473] It is probable that the orientation, target strand, and distance of the S. pyogenes Cas9-D10A-RNP target site to the Cpf1-RNP target site leads to differences in the position and length of the mutations promoted by the additional DNA nick (FIG. 31A). It should be noted that in certain applications this directional manipulation of the indel profile, i.e., an increase in the frequency of indels occurring between the Cpf1-RNP and S. pyogenes Cas9 D10A-RNP binding sites, could be used to favor a desired editing outcome, to increase the rate of productive indels (e.g., indels disrupting a targeted site). In the case set-out within, to disrupt the dCCAAT target region and induce HbF protein expression, the co-delivery of HBG1-1-AsCpf1H800A-RNP with S. pyogenes D10A-RNP led to an increase of gamma globin levels by 16.7% (SpG-D10A-RNP) or 19.0% (SpA-D10A-RNP) above levels detected in mock electroporated cells, as detected by UPLC analysis after 18 days of erythroid differentiation post electroporation (FIG. 29 and Table. 16). The frequency of productive indels was higher when pairing HBG1-1-AsCpf1H800A-RNP with SpA-D10A-RNP (versus SpG-D10A-RNP) as a higher increase in HbF levels (19% with Cas9D10A-SpA-RNP vs 16.7% with SpG-D10A-RNP) was achieved from a lower editing level (42.6% with SpA-D10A-RNP vs 88.6% with SpG-D10A-RNP) (FIG. 29 and Table 16).

### Example 17: Cpf1 Editing is Increased without Altering the Editing Profile in the Presence of S. pyogenes Cas9 WT RNP Containing a Dead Guide RNA

[0474] When co-delivering HBG1-1-AsCpf1H800A-RNP (at a fixed dose of 6 μM) to mPB CD34+ cells with increasing doses of Sp182-Cas9-RNP (complexed with a truncated, 95mer dead gRNA, Sp182), using the MaxCyte electroporator device, an editing boost has been observed up to greater than 10-fold (85.4% editing with the highest dose of Sp182-Cas9-RNP versus 8.0% when HBG1-1-AsCpf1H800A-RNP was delivered alone) (FIG. 29). The levels of editing achieved here by co-delivering Sp182-Cas9-RNP also greatly surpassed the levels of editing obtained using the MaxCyte electroporator device when HBG1-1-AsCpf1H800A-RNP was delivered alone at doses as high as 20 uM (FIG. 28B). In contrast to the results observed by co-delivering a D10A-RNP (in Example 16), the increase in editing achieved by co-delivering HBG1-1-AsCpf1H800A-RNP with Sp182-Cas9-RNP (Cas9-WT complexed with a truncated gRNA) was not associated with an apparent impact on the indel profile. The indels detected in electroporated cells were centered around the Cpf1 cut site in an approximal symmetrical fashion and no indels were detected at the Sp182-Cas9-RNP target site (FIG. 32A). Of note, 96% of the total indels were disrupting the distal-CCAAT box, and 79.5% of total indels disrupted 3 or more nucleotides of the CCAAT box motif (FIG. 32B). Further dosing optimization using HBG1-1-AsCpf1H800A-RNP (composed of His-AsCpf1-sNLS-sNLS-H800A (SEQ ID NO: 1032) complexed to HBG1-1 gRNA (SEQ ID NO: 1022)) and Sp182-Cas9-RNP enabled editing levels of up to 92% in mPB-CD34+ cells at 120 hours post-electroporation using the MaxCyte device, and lead to gamma chain expression levels 32% above background in erythroid derived cells (41% of gamma chains in treated cells, 8% in mock treated cells) (FIG. 33). Those results demonstrate that an RNP composed of WT S. pyogenes Cas9 protein complexed with a truncated gRNA can increase the editing from a proximally binding Cpf1-RNP without introducing detectable levels of editing at its own binding site nor noticeably affecting the length nor directionality of indels generated by the Cpf1-RNP. Here, the editing enhancement provided by the Sp182-Cas9-RNP enables high editing of the HBG1-1-AsCpf1H800A-RNP at the HBG promoter, with a high frequency of indels disrupting the distal CCAAT box target motif and leading to therapeutically relevant levels of gamma chain expression in the bulk erythroid progeny of the electroporated cells.

### Example 18: Clonal HbF Distribution within Cell Population Edited with Cpf1 gRNA Targeting the Distal CCAAT Box

[0475] A single cell experiment was next performed to evaluate the distribution of gamma chain expression levels in erythroid cells derived from mPB CD34+ cells electroporated with the HBG1-1-AsCpf1H800A-RNP (composed of His-AsCpf1-sNLS-sNLS-H800A (SEQ ID NO: 1032) complexed to HBG1-1 gRNA with a 3′ modification as shown in Table 14 (SEQ ID NO: 1041))+Sp182-Cas9-RNP combination (FIG. 27F, Table 14). After being left to recover during 48 hours post-electroporation, the cells were sorted by Fluorescence Activated Cell Sorting (FACS) at 1-cell/well in non-tissue culture treated 384-well plates. The cells were then differentiated and expanded clonally for 18 days into the erythroid lineage (adapted from Giarratana 2011). UPLC analysis was performed to determine the distribution of gamma chain expression levels (percentage of gamma chains/[total beta-like chains]) in the clonal erythroid progeny of cells derived from the total population of mPB-CD34+ cells initially edited. It is considered that in order to achieve a functional benefit and alleviate symptoms associated with sickle cell disease, ˜30% of the erythroid cells should have fetal hemoglobin levels greater than 30%. Of the clones analyzed, 83.1% had gamma chains levels above the median level detected in erythroid clones derived from mock electroporated mPB CD34+ cells (median value=18.8%), 64.2% had gamma chains levels exceeding 30% of total beta-like and 35.8% had gamma chains levels exceeding 48.8% of total beta-like (30%+18.8% median level in control cells) (FIG. 34).

### Example 19: Screen of Cpf1 gRNAs Targeting the HBG Promoter Region

[0476] To identify other AsCpf1 gRNA that could be used as a component of a single RNP or in combination with a “booster element” to increase editing of the HBG promoter region in CD34+ cells and induce fetal globin expression in the erythroid progeny of modified cells, His-AsCpf1-NLS-NLS (“AsCpf1,” SEQ ID NO: 1000); AsCpf1 S542R/K607R (“AsCpf1 RR,” SEQ ID NO: 1036); or AsCpf1 S542R/K548V/N552R (“AsCpf1 RVR,” SEQ ID NO: 1037) gRNA sequences targeting several domains of the HBG promoter (Table 17) were designed (listed in Table 18). AsCpf1 RR and AsCpf1 RVR are engineered AsCpf1 variants which recognize TYCV/ACCC/CCCC and TATV/RATR PAMs, respectively (Gao 2017).

TABLE 17
Subdomains of the HBG genomic region

| Genomic | | |
|---|---|---|
| Coordinate of | | |
| HbG* | Nucleotides | Name of Region |
| Chr 11 | TCCTAAAGCT TGGAACACTT | Region 1: |
| (NC_000011.10): | TCCCTTCCTT AAGAACCATC | Downstream of |
| 5,247,883- | CTTGCTACTC AGCTGCAATC | HBG1 |
| 5,248,186 | AATCCAGCCC CCAGGTCTTC | |
| | ACTGAACCTT TTCCCATCTC | |
| | TTCCAAAACA TCTGTTTCTG | |
| | AGAAGTCCTG TCCTATAGAG | |
| | GTCTTTCTTC CCACCGGATT | |
| | TCTCCTACAC CATTTACTCC | |
| | CACTTGCAGA ACTCCCGTGT | |
| | ACAAGTGTCT TTACTGCTTT | |
| | TATTTGCTCA TCAAAATGCA | |
| | CATCTCATAT AAAAATAAAT | |
| | GAGGAGCATG CACACACCAC | |
| | AAACACAAAC AGGCATGCAG | |
| | AAAT | |
| | (SEQ ID NO: 1118) | |
| Chr 11 | ATAAAGATGA ACCCATAGTG | Region 2: HBG1 |
| (NC_000011.10): | AGCTGAGAGC TCCAGCCTGG | Intron 2-A |
| 5,248,509- | CCTCCAGATA ACTACACACC | |
| 5,249,173 | AAGCTTCCAC CCAGAATCAA | |
| | GCCTATGTTA ACTTCCCTCA | |
| | AAGCCTGAGA TTTTGCCTTC | |
| | CCATTAAATG CAGGTAGTTG | |
| | TTCCCCTTCA AGCACTAGTC | |
| | ACTGGCCATA ATTTAAATCT | |
| | TGCTATCTTC TTGCCACCAT | |
| | GAACCCTGTA TGTTGTAGGC | |
| | TGAAGACGTT AAAAGAAACA | |
| | CACGCTGACA CACACACACA | |
| | CACGCGCGCG CGCACACACA | |
| | CACACACACA CAGAGCTGAC | |
| | TTTCAAAATC TACTCCAGCC | |
| | CAAATGTTTC AATTGTTCCT | |
| | CACCCCTGGA CATACTTTGC | |
| | CCCCATCTGG AATTAAAGGA | |
| | TATAAGTTTG TAATGAAGCA | |
| | TTAGCAGCAT TTTATATGTG | |
| | TCCAGCTGAT ATAGGAATAG | |
| | CCTTAGCAAT GTATGTTTGG | |
| | CCACCAAAGT TCCCCACTTT | |
| | GACTGAGCCA ATATATGCCT | |
| | TCTGCCTGCA TCTTTTTAAC | |
| | GACCATACTT GTCCTGCCTC | |
| | CAGATAGATG TTTTAAAACA | |
| | ACAAAAATGA GGGAAAGATG | |
| | AAAGTTCTTT CTACTGGAAT | |
| | CTAATAAAGA AAAGTCATTT | |
| | TCCTCATTTC CACCTCTCTT | |
| | TTCTCAAAGT CAAAATTGTC | |
| | CATCT | |
| | (SEQ ID NO: 1119) | |
| Chr 11 | CCCTAAAACA TTACCACTGG | Region 3: HBG1 |
| (NC_000011.10): | GTCTCAGCCC AGTTAGTCCT | Intron 2-B |
| 5,249,198- | CTGCAGTTTC TTCACCCCCA | |
| 5,249,362 | ACCCCAGTAT CTTCAAACAG | |
| | CTCACACCCT GCTGTGCTCA | |
| | GATCAATACT CCGTTGTCTA | |
| | AGTTGCCTCG AGACTAAAGG | |
| | CAACAGGGCT GAAACATCTC | |
| | CTGGA | |
| | (SEQ ID NO: 1120) | |
| Chr 11 | CTGTGAGATT GACAAGAACA | Region 4: HBG1 |
| (NC_000011.10): | GTTTGACAGT CAGAAGGTGC | Intron 1 |
| 5,249,591- | CACAAATCCT GAGAAGCGAC | |
| 5,249,712 | CTGGACTTTT GCCAGGCACA | |
| | GGGTCCTTCC TTCCCTCCCT | |
| | TGTCCTGGTC ACCAGAGCCT | |
| | AC | |
| | (SEQ ID NO: 1121) | |
| Chr 11 | GCCGCCGGCC CCTGGCCTCA | Region 5: HBG1 |
| (NC_000011.10): | CTGG | −60 nt region |
| 5,249,904- | (SEQ ID NO: 1122) | from |
| 5,249,927 | | Transcription |
| | | Start Site |
| | | (TSS) |
| Chr 11 | CCTTGTCAAG GCTATTGGTC | Region 6: HBG1 |
| (NC_000011.10): | AAGGCAAGGC TGG | −110 nt region |
| 5,249,955- | (SEQ ID NO: 1123) | from TSS |
| 5,249,987 | | |
| Chr 11 | TGAGATAGTG TGGGGAAGGG | Region 7: HBG1 |
| (NC_000011.10): | GCCCCC AAGAGGATAC | −200 nt region |
| 5,250,040- | (SEQ ID NO: 1124) | from TSS |
| 5,250,075 | | |
| Chr 11 | TATAGCCTTT GCCTTGTTCC | Region 8: HBG1 |
| (NC_000011.10): | GATTCAGTCA TTCCAGTTTT | −250 nt region |
| 5,250,089- | T | from TSS |
| 5,250,129 | (SEQ ID NO: 1125) | |
| Chr 11 | TCTTCCCTTT AGCTAGTTTC | Region 9: HBG1 |
| (NC_000011.10): | CTTCTCCCAT CATAGAGGAT | −333 nt region |
| 5,250,141- | ACCAGGACTT CTTTTGTCAG | from TSS |
| 5,250,254 | CCGTTTTTTA CCTTCTTGTC | |
| | TCTAGCTCCA GTGAGGCCTG | |
| | TAGTTTAAAG CTAA | |
| | (SEQ ID NO: 1126) | |
| Chr 11 | CCACAGTTTC AGCGCAGTAA | Region 10: |
| (NC_000011.10): | TAGATTAGTG TTACATAATA | HBG1 −650 nt |
| 5,250,464- | TAAGACCTAA TGCTTACCTC | region from |
| 5,250,549 | AATATCTACT TATCCGTACC | TSS |
| | TATTTG | |
| | (SEQ ID NO: 1127) | |
| Chr 11 | TATTCAGGTA TGTATGTATA | Region 11: |
| (NC_000011.10): | CACCAGATGA TGTGTATTTA | HBG1 −800 nt |
| 5,250,594- | CCACTGGATA AGTGTGTGTG | region from |
| 5,250,735 | CTGGCTGATG ACCCAGGGTT | TSS |
| | TTGGCGTAGC TCTTCTATGC | |
| | TCAGTAAAGA TGATGGTAGA | |
| | ATGTTCTTTG GCAGGTACTG | |
| | TG | |
| | (SEQ ID NO: 1128) | |
| Chr 11 | CAATAAAGAT GAACCCATAG | Region 12: |
| (NC_000011.10): | TGAGCTGAGA GCTCCAGCCT | HBG2 Intron |
| 5,253,425- | GGCCTCCAGA TAACTACACA | 2-A |
| 5,254,121 | CCAAGCTTCC ACCCAGAATC | |
| | AAGCCTATGT TAACTTCCCT | |
| | CAAAGCCTGA GATTTTGCTT | |
| | TCCCATTAAA TGCAGGTAGT | |
| | TGTTCTTCTT GCAGCACTAG | |
| | TCACTGGCCA TAATTTAAAT | |
| | CTTGTTATCT TCTTGCCACC | |
| | ATGAACCCTG TATGCTGTAG | |
| | GCTGAAAACG TTAAAAGAAA | |
| | CACACGCTCT CACACACACA | |
| | CAAACACACG CGCGCACACA | |
| | CACACACACA CACACAGAGC | |
| | TGACTTTCAA AATCTACTCC | |
| | AGCCCAAATG TTTCAATTGT | |
| | TCCTCACCCC TGGACATACT | |
| | TTGCCCCCAT CTGGAATTAA | |
| | AGGATATAAG TTTGTAATGA | |
| | AGCATTAGCA GCATTTTATA | |
| | TGTGTCCAGC TGATATAGGA | |
| | ATAGCCTTAG CAATGTATGT | |
| | TTGGCCACCA AAGTTCCCCA | |
| | CTTTGACTGA GCCAATATAT | |
| | GCCTTCTGCC TGCATCTTTT | |
| | TAATGACCAT ACTTGTCCTG | |
| | CCTCCAGATA GATGTTTTAA | |
| | AACGAATAAC AAAAATAGGG | |
| | GAAAGGTGAA AGTTCTTTCT | |
| | ACCGAAATCT AATAAAGAAA | |
| | AGTCATTTTC CTCATTTCCA | |
| | CCTCTCTTTT CTCAAAGTCA | |
| | AAGTTGTCCA TCTAGATTTT | |
| | CAGAGGCACT CCTTAGG | |
| | (SEQ ID NO: 1129) | |
| Chr 11 | CCCTAAAACA TTGCCACTGG | Region 13: |
| (NC_000011.10): | GTCTCAGCCC AGTTAGTCCT | HBG2 Intron |
| 5,254,122- | CTGCAGTTTC TTCACTCCCA | 2-B |
| 5,254,306 | ACCCCAGTAT CTTCAAACAG | |
| | CTCACACCCT GCTGTGCTCA | |
| | GATCAATACT CAGTTGTCTA | |
| | AGTTGCCTCG AGACTAAAGG | |
| | CAACAGTGCT GAAACATCTC | |
| | CTGGACTCAC CTTGAAGTTC | |
| | TCAGG | |
| | (SEQ ID NO: 1130) | |
| Chr 11 | AGCCTGTGAG ATTGACAAGA | Region 14: |
| (NC_000011.10): | ACAGTTTGAC AGTCAGAAGG | HBG2 Intron 1 |
| 5,254,511- | TGCCACAAAT CCTGAGAAGC | |
| 5,254,648 | GACCTGGACT TTTGCCAGGC | |
| | ACAGGGTCCT TCCTTCCCTC | |
| | CCTTGTCCTG GTCACCAGAG | |
| | CCTACCTTCC CAGGGTT | |
| | (SEQ ID NO: 1131) | |
| Chr 11 | CCGCCGGCCC CTGGCCTCAC | Region 15: |
| (NC_000011.10): | TGGATACTCT AAGACTAT | HBG2 −60 nt |
| 5,254,829- | (SEQ ID NO: 1132) | region from |
| 5,254,866 | | TSS |
| Chr 11 | CCTTGTCAAG GCTATTGGTC | Region 16: |
| (NC_000011.10): | AAGGCAAGGC T | HBG2 −110 nt |
| 5,254,879- | (SEQ ID NO: 1133) | region from |
| 5,254,909 | | TSS |
| Chr 11 | CAGGGACCGT TTCAGACAGA | Region 17: |
| (NC_000011.10): | TATTTGCATT GAGATAGTGT | HBG2 −200 nt |
| 5,254,935 | GGGGAAGGGG CCCCCAAGAG | region from |
| 5,255,009 | GATACTGCTG CTTAA | TSS |
| | (SEQ ID NO: 1134) | |
| Chr 11 | TTGCCTTGTT CCGATTCAGT | Region 18: |
| (NC_000011.10): | CATTCCAAT | HBG2 −250 nt |
| 5,255,025- | (SEQ ID NO: 1135) | region from |
| 5,255,053 | | TSS |
| Chr 11 | TTTAGCTAGT TTTCTTCTCC | Region 19: |
| (NC_000011.10): | CACCATAGAA GATACCAGGA | HBG2 −330 nt |
| 5,255,076- | CTTCTTTTGT CAGCCGTTTT | region from |
| 5,255,179 | TCACCTTCTT GTCTGTAGCT | TSS |
| | CCAGTGAGGC CTGTAGTTTA | |
| | AAGT | |
| | (SEQ ID NO: 1136) | |
| Chr 11 | GGACACGTCT TAGTCTCATT | Region 20: |
| (NC_000011.10): | TAGTAAGCAT TGGTTTCC | HBG2 −500 nt |
| 5,255,255- | (SEQ ID NO: 1137) | region from |
| 5,255,292 | | TSS |
| Chr 11 | TTTTTTATAT TCAGGTATGT | Region 21: |
| (NC_000011.10): | ATGTAGGCAC CCGATGATGT | HBG2 −800 nt |
| 5,255,518- | GTATTTATCA CTGGATAAGT | region from |
| 5,255,641 | GTATGTGCTG GCTGATGACC | TSS |
| | CAGGGTTTTG GTGTAGCTCT | |
| | TCTATGCTCG GTAAAGATGA | |
| | TGGT | |
| | (SEQ ID NO: 1138) | |

*NCBI Reference Sequence NC_000011, the coordinates are reported using the One-based coordinate system, “Homo sapiens chromosome 11, GRCh38.p12 Primary Assembly,” (Version NC_000011.10).

TABLE 18
Cpf1 guide RNAs

| gRNA | gRNA | gRNA | | | | |
|---|---|---|---|---|---|---|
| targeting | Targeting | Targeting | | | | |
| domain | domain | domain | Genomic | Genomic | | |
| sequence | sequence | sequence | coordinates | coordinates | % | |
| ID* | (RNA) | (DNA) | at HbG1** | at HbG2** | Editing | Strand |
| AsCpf1 HBG1 | AGACAGAUAU | AGACAGATAT | Chr11:5250024: | Chr11:5254948: | 5.43 | + |
| Promoter-1 | UUGCAUUGAG | TTGCATTGAG | 5250043 | 5254967 | | |
| | (SEQ ID | (SEQ ID | | | | |
| | NO: 1139) | NO: 1140) | | | | |
| AsCpf1 HBG1 | CAUUGAGAUA | CATTGAGATA | Chr11:5250037: | Chr11:5254961: | 8.30 | + |
| Promoter-2 | GUGUGGGGAA | GTGTGGGGAA | 5250056 | 5254980 | | |
| | (SEQ ID | (SEQ ID | | | | |
| | NO: 1141) | NO: 1142) | | | | |
| AsCpf1 HBG1 | UAGCCUUUGC | TAGCCTTTGC | Chr11:5250091: | Chr11:5255019: | 0.23 | + |
| Promoter-3 | CUUGUUCCGA | CTTGTTCCGA | 5250110 | 5255038 | | |
| | (SEQ ID | (SEQ ID | | | | |
| | NO: 1143) | NO: 1144) | | | | |
| AsCpf1 HBG1 | CCUUGUUCCG | CCTTGTTCCG | Chr11:5250100: | Chr11:5255028: | 1.15 | + |
| Promoter-4 | AUUCAGUCAU | ATTCAGTCAT | 5250119 | 5255047 | | |
| | (SEQ ID | (SEQ ID | | | | |
| | NO: 1145) | NO: 1146) | | | | |
| AsCpf1 HBG1 | UCUAAUUUAU | TCTAATTTAT | Chr11:5250131: | Chr11:5255059: | 0.16 | + |
| Promoter-5 | UCUUCCCUUU | TCTTCCCTTT | 5250150 | 5255078 | | |
| | (SEQ ID | (SEQ ID | | | | |
| | NO: 1147) | NO: 1148) | | | | |
| AsCpf1 HBG1 | CUUCUCCCAU | CTTCTCCCAT | Chr11:5250161: | | 12.73 | + |
| Promoter-6 | CAUAGAGGAU | CATAGAGGAT | 5250180 | | | |
| | (SEQ ID | (SEQ ID | | | | |
| | NO: 1149) | NO: 1150) | | | | |
| AsCpf1 HBG2 | UUCUCCCACC | TTCTCCCACC | | Chr11:5255090: | 8.11 | + |
| Promoter-7 | AUAGAAGAUA | ATAGAAGATA | | 5255109 | | |
| | (SEQ ID | (SEQ ID | | | | |
| | NO: 1151) | NO: 1152) | | | | |
| AsCpf1 HBG1 | CCACUGGAUA | CCACTGGATA | Chr11:5250634: | | 13.33 | + |
| Promoter-8 | AGUGUGUGUG | AGTGTGTGTG | 5250653 | | | |
| | (SEQ ID | (SEQ ID | | | | |
| | NO: 1153) | NO: 1154) | | | | |
| AsCpf1 HBG1 | GCGUAGCUCU | GCGTAGCTCT | Chr11:5250677: | | 13.48 | + |
| Promoter-9 | UCUAUGCUCA | TCTATGCTCA | 5250696 | | | |
| | (SEQ ID | (SEQ ID | | | | |
| | NO: 1155) | NO: 1156) | | | | |
| AsCpf1 HBG1 | CUGAGCAUAG | CTGAGCATAG | Chr11:5250678: | | 10.73 | − |
| Promoter-10 | AAGAGCUACG | AAGAGCTACG | 5250697 | | | |
| | (SEQ ID | (SEQ ID | | | | |
| | NO: 1157) | NO: 1158) | | | | |
| AsCpf1 HBG2 | UCACUGGAUA | TCACTGGATA | | Chr11:5255565: | 0.43 | + |
| Promoter-11 | AGUGUAUGUG | AGTGTATGTG | | 5255584 | | |
| | (SEQ ID | (SEQ ID | | | | |
| | NO: 1159) | NO: 1160) | | | | |
| AsCpf1 HBG2 | GUGUAGCUCU | GTGTAGCTCT | | Chr11:5255608: | 5.78 | + |
| Promoter-12 | UCUAUGCUCG | TCTATGCTCG | | 5255627 | | |
| | (SEQ ID | (SEQ ID | | | | |
| | NO: 1161) | NO: 1162) | | | | |
| AsCpf1 HBG2 | CCGAGCAUAG | CCGAGCATAG | | Chr11:5255609: | 3.24 | − |
| Promoter-13 | AAGAGCUACA | AAGAGCTACA | | 5255628 | | |
| | (SEQ ID | (SEQ ID | | | | |
| | NO: 1163) | NO: 1164) | | | | |
| HBG1-1 | CCUUGUCAAG | CCTTGTCAAG | Chr11:5249955: | Chr11:5254879: | 17.96 | + |
| AsCpf1 | GCUAUUGGUC | GCTATTGGTC | 5249974 | 5254898 | | |
| | (SEQ ID | (SEQ ID | | | | |
| | NO: 1002) | NO: 1003) | | | | |
| AsCpf1 RR | GACAGAUAUU | GACAGATATT | Chr11:5250025: | Chr11:5254949: | 8.48 | + |
| HBG1 | UGCAUUGAGA | TGCATTGAGA | 5250044 | 5254968 | | |
| Promoter-1 | (SEQ ID | (SEQ ID | | | | |
| | NO: 1167) | NO: 1168) | | | | |
| AsCpf1 RR | ACACUAUCUC | ACACTATCTC | Chr11:5250031: | Chr11:5254955: | 0.09 | − |
| HBG1 | AAUGCAAAUA | AATGCAAATA | 5250050 | 5254974 | | |
| Promoter-2 | (SEQ ID | (SEQ ID | | | | |
| | NO: 1169) | NO: 1170) | | | | |
| AsCpf1 RR | CACACUAUCU | CACACTATCT | Chr11:5250032: | Chr11:5254956: | 2.10 | − |
| HBG1 | CAAUGCAAAU | CAATGCAAAT | 5250051 | 5254975 | | |
| Promoter-3 | (SEQ ID | (SEQ ID | | | | |
| | NO: 1171) | NO: 1172) | | | | |
| AsCpf1 RR | CCACACUAUC | CCACACTATC | Chr11:5250033: | Chr11:5254957: | 2.52 | − |
| HBG1 | UCAAUGCAAA | TCAATGCAAA | 5250052 | 5254976 | | |
| Promoter-4 | (SEQ ID | (SEQ ID | | | | |
| | NO: 1173) | NO: 1174) | | | | |
| AsCpf1 RR | UUCCCCACAC | TTCCCCACAC | Chr11:5250037: | Chr11:5254961: | 0.05 | − |
| HBG1 | UAUCUCAAUG | TATCTCAATG | 5250056 | 5254980 | | |
| Promoter-5 | (SEQ ID | (SEQ ID | | | | |
| | NO: 1175) | NO: 1176) | | | | |
| AsCpf1 RR | GAUUCAGUCA | GATTCAGTCA | Chr11:5250109: | | 0.77 | + |
| HBG1 | UUCCAGUUUU | TTCCAGTTTT | 5250128 | | | |
| Promoter-6 | (SEQ ID | (SEQ ID | | | | |
| | NO: 1177) | NO: 1178) | | | | |
| AsCpf1 RR | AUUCAGUCAU | ATTCAGTCAT | Chr11:5250110: | | 0.24 | + |
| HBG1 | UCCAGUUUUU | TCCAGTTTTT | 5250129 | | | |
| Promoter-7 | (SEQ ID | (SEQ ID | | | | |
| | NO: 1179) | NO: 1180) | | | | |
| AsCpf1 RR | GUCAUUCCAG | GTCATTCCAG | Chr11:5250115: | | 1.00 | + |
| HBG1 | UUUUUCUCUA | TTTTTCTCTA | 5250134 | | | |
| Promoter-8 | (SEQ ID | (SEQ ID | | | | |
| | NO: 1181) | NO: 1182) | | | | |
| AsCpf1 RR | AGUUUUUCUC | AGTTTTTCTC | Chr11:5250123: | | 0.15 | + |
| HBG1 | UAAUUUAUUC | TAATTTATTC | 5250142 | | | |
| Promoter-9 | (SEQ ID | (SEQ ID | | | | |
| | NO: 1183) | NO: 1184) | | | | |
| AsCpf1 RR | GUUUUUCUCU | GTTTTTCTCT | Chr11:5250124: | | 0.15 | + |
| HBG1 | AAUUUAUUCU | AATTTATTCT | 5250143 | | | |
| Promoter-10 | (SEQ ID | (SEQ ID | | | | |
| | NO:1185) | NO:1186) | | | | |
| AsCpf1 RR | GAUUCAGUCA | CAAGAGGATA | | Chr11:5254989: | *** | + |
| HBG2 | UUCCAAUUUU | CTGCTGCTTA | | 5255008 | | |
| Promoter-11 | (SEQ ID | (SEQ ID | | | | |
| | NO: 1187) | NO: 1188) | | | | |
| AsCpf1 RR | AUUCAGUCAU | AAGAGGATAC | | Chr11:5254990: | *** | + |
| HBG2 | UCCAAUUUUU | TGCTGCTTAA | | 5255009 | | |
| Promoter-12 | (SEQ ID | (SEQ ID | | | | |
| | NO: 1189) | NO: 1190) | | | | |
| AsCpf1 RR | GUCAUUCCAA | GATTCAGTCA | | Chr11:5255037: | 0.25 | + |
| HBG2 | UUUUUCUCUA | TTCCAATTTT | | 5255056 | | |
| Promoter-13 | (SEQ ID | (SEQ ID | | | | |
| | NO: 1191) | NO: 1192) | | | | |
| AsCpf1 RR | AAUUUUUCUC | ATTCAGTCAT | | Chr11:5255038: | 0.13 | + |
| HBG2 | UAAUUUAUUC | TCCAATTTTT | | 5255057 | | |
| Promoter-14 | (SEQ ID | (SEQ ID | | | | |
| | NO: 1193) | NO: 1194) | | | | |
| AsCpf1 RR | AUUUUUCUCU | GTCATTCCAA | | Chr11:5255043: | 0.32 | + |
| HBG2 | AAUUUAUUCU | TTTTTCTCTA | | 5255062 | | |
| Promoter-15 | (SEQ ID | (SEQ ID | | | | |
| | NO: 1195) | NO: 1196) | | | | |
| AsCpf1 RR | UUCUCCCAUC | AATTTTTCTC | | Chr11:5255051: | 0.14 | + |
| HBG2 | AUAGAGGAUA | TAATTTATTC | | 5255070 | | |
| Promoter-16 | (SEQ ID | (SEQ ID | | | | |
| | NO: 1197) | NO: 1198) | | | | |
| AsCpf1 RR | AUCAUAGAGG | ATTTTTCTCT | | Chr11:5255052: | 0.10 | + |
| HBG2 | AUACCAGGAC | AATTTATTCT | | 5255071 | | |
| Promoter-17 | (SEQ ID | (SEQ ID | | | | |
| | NO: 1199) | NO: 1200) | | | | |
| AsCpf1 RR | ACCAUAGAAG | TTCTCCCATC | Chr11:5250162: | | 1.40 | + |
| HBG1 | AUACCAGGAC | ATAGAGGATA | 5250181 | | | |
| Promoter-18 | (SEQ ID | (SEQ ID | | | | |
| | NO: 1201) | NO: 1202) | | | | |
| AsCpf1 RR | CAGUACCUGC | ATCATAGAGG | Chr11:5250169: | | 7.88 | + |
| HBG1 | CAAAGAACAU | ATACCAGGAC | 5250188 | | | |
| Promoter-19 | (SEQ ID | (SEQ ID | | | | |
| | NO: 1203) | NO: 1204) | | | | |
| AsCpf1 RR | UAGUAUCUGG | ACCATAGAAG | | Chr11:5255097: | 13.03 | + |
| HBG2 | UAAAGAGCAU | ATACCAGGAC | | 5255116 | | |
| Promoter-20 | (SEQ ID | (SEQ ID | | | | |
| | NO: 1205) | NO: 1206) | | | | |
| AsCpf1 RR | UCAAUGCAAA | CAGTACCTGC | Chr11:5250714: | | 13.31 | − |
| HBG1 | UAUCUGUCUG | CAAAGAACAT | 5250733 | | | |
| Promoter-21 | (SEQ ID | (SEQ ID | | | | |
| | NO: 1207) | NO: 1208) | | | | |
| AsCpf1 RR | CUCUUGGGGG | TAGTATCTGG | | Chr11:5255645: | 4.07 | − |
| HBG2 | CCCCUUCCCC | TAAAGAGCAT | | 5255664 | | |
| Promoter-22 | (SEQ ID | (SEQ ID | | | | |
| | NO: 1209) | NO: 1210) | | | | |
| AsCpf1 RVR | GAUUCAGUCA | TCAATGCAAA | Chr11:5250023: | Chr11:5254947: | 0.15 | − |
| HBG1 | UUCCAAUUUU | TATCTGTCTG | 5250042 | 5254966 | | |
| Promoter-1 | (SEQ ID | (SEQ ID | | | | |
| | NO: 1211) | NO: 1212) | | | | |
| AsCpf1 RVR | AUUCAGUCAU | CTCTTGGGGG | Chr11:5250051: | Chr11:5254975: | 1.09 | − |
| HBG1 | UCCAAUUUUU | CCCCTTCCCC | 5250070 | 5254994 | | |
| Promoter-2 | (SEQ ID | (SEQ ID | | | | |
| | NO: 1213) | NO: 1214) | | | | |
| AsCpf1 RVR | AAAAAAAUUA | AAAAAAATTA | Chr11:5250069: | | *** | − |
| HBG1 | GCAGUAUCCU | GCAGTATCCT | 5250088 | | | |
| Promoter-3 | (SEQ ID | (SEQ ID | | | | |
| | NO: 1215) | NO: 1216) | | | | |
| AsCpf1 RVR | GCCUUUGCCU | GCCTTTGCCT | Chr11:5250093: | Chr11:5255021: | 3.96 | + |
| HBG1 | UGUUCCGAUU | TGTTCCGATT | 5250112 | 5255040 | | |
| Promoter-4 | (SEQ ID | (SEQ ID | | | | |
| | NO: 1217) | NO: 1218) | | | | |
| AsCpf1 RVR | AAAAAAAUUA | AAAAAAATTA | | Chr11:5254997: | *** | − |
| HBG2 | AGCAGCAGUA | AGCAGCAGTA | | 5255016 | | |
| Promoter-5 | (SEQ ID | (SEQ ID | | | | |
| | NO: 1219) | NO: 1220) | | | | |
| AsCpf1 RVR | CUCAGUAAAG | CTCAGTAAAG | Chr11:5250693: | | 5.32 | + |
| HBG1 | AUGAUGGUAG | ATGATGGTAG | 5250712 | | | |
| Promoter-6 | (SEQ ID | (SEQ ID | | | | |
| | NO: 1221) | NO: 1222) | | | | |
| AsCpf1 RVR | ACUGGAUAAG | ACTGGATAAG | | Chr11:5255567: | 9.78 | + |
| HBG2 | UGUAUGUGCU | TGTATGTGCT | | 5255586 | | |
| Promoter-7 | (SEQ ID | (SEQ ID | | | | |
| | NO: 1223) | NO: 1224) | | | | |
| AsCpf1 RVR | UGCUGGCUGA | TGCTGGCTGA | Chr11:5250652: | Chr11:5255583: | 0.24 | + |
| HBG2 | UGACCCAGGG | TGACCCAGGG | 5250671 | 5255602 | | |
| Promoter-8 | (SEQ ID | (SEQ ID | | | | |
| | NO: 1225) | NO: 1226) | | | | |
| AsCpf1 RVR | CUCGGUAAAG | CTCGGTAAAG | | Chr11:5255624: | 5.75 | + |
| HBG2 | AUGAUGGUAG | ATGATGGTAG | | 5255643 | | |
| Promoter-9 | (SEQ ID | (SEQ ID | | | | |
| | NO: 1227) | NO: 1228) | | | | |
| AsCpf1 RVR | UGGUAAAGAG | TGGTAAAGAG | | Chr11:5255638: | 8.55 | − |
| HBG2 | CAUUCUACCA | CATTCTACCA | | 5255657 | | |
| Promoter-10 | (SEQ ID | (SEQ ID | | | | |
| | NO: 1229) | NO: 1230) | | | | |

*the gRNA ID name provides the particular Cpf1 molecule used in the RNP complex
**NCBI Reference Sequence NC_000011, the coordinates are reported using the One-based coordinate system, “Homo sapiens chromosome 11, GRCh38.p12 Primary Assembly,” (Version NC_000011.10).
***represents gRNAs that were not tested.

[0477] RNPs (5 μM) containing AsCpf1 protein (SEQ ID NO: 1000), AsCpf1 RR protein (SEQ ID NO: 1036), or AsCpf1 RVR (SEQ ID NO: 1037) complexed with single gRNAs comprising gRNA targeting domains from Table 18 (see gRNA ID name for the particular Cpf1 molecule used) were delivered to mobilized peripheral blood (mPB) CD34+ cells using the Amaxa electroporator device (Lonza). After 72 hours, genomic DNA was extracted from cells and the level of insertions/deletions at the target site was then analyzed by Illumina sequencing (NGS) of the PCR amplified target site. The percentage of editing (indels=deletions and insertions) for each gRNA is shown in Table 18 above. In certain embodiments, Cpf1 RNPs comprising one or more of the gRNAs set forth in Table 18 may be used to target the regions listed in Table 17 to induce HbF expression and may be co-delivered with a “booster element” to achieve higher editing levels compared to the editing level of the Cpf1 RNP alone.

### Example 20: Co-Delivery of HBG1-1-Cpf1 RNP Targeting the CCAAT Box with ssODN Supports an Increase in Gene Editing in Human Hematopoietic Stem/Progenitor Cells

[0478] Having demonstrated that a 100 nt ssODN (50/50 homology) donor template encoding the “4 nt deletion” (HBGΔ−112:−115) co-delivered with Cas9 RNP generated a comparable outcome to the longer 180 nt templates (Example 10 and FIG. 23), a 100 nt ssODN generating the “18 nt deletion” (HBG Δ−104:−121) (i.e., ssODN OLI16431 (SEQ ID NO: 1040), Table 11) was co-delivered with Cpf1 RNP to further investigate the editing outcome.

[0479] Briefly, human adult mPB CD34+ cells pre-stimulated for two days in medium supplemented with human cytokines were electroporated with RNP comprising the His-AsCpf1-sNLS-sNLS H800A protein (SEQ ID NO:1032, Table 14) complexed to modified HBG1-1 gRNA (SEQ ID NO: 1041, Table 14) (“His-AsCpf1-sNLS-sNLS H800A_HBG1-1 RNP”) either alone at 6 μM or in combination with OLI16431 (0.5-6 μM). Co-delivery of the RNP and ssODN donor encoding the 18 nt deletion with positive strand homology arms (OLI16431) enhanced the editing frequency from 8.0% without donor to 75.6%, as determined by sequencing analysis of the HBG PCR product from genomic DNA extracted at 72 hours post-electroporation (FIG. 35A). This level of editing enabled an increase in HbF levels of ˜24% above background (FIG. 35A). Additionally, it should be noted that there was no decrease observed in cell viability (FIG. 35B) as measured by DAPI exclusion or of colony forming potential (FIG. 35C) at any of the doses tested.

### Example 21: Optimization of HBG1-1-Cpf1 RNP and OLI16431 Dosing to Maximize Editing at the RNP Targeting Distal CCAAT Box Site

[0480] Having demonstrated increased editing when co-delivering ssODN with RNP (Examples 9-11, 13, 20), the same methodology was used to optimize the dosing of each component in order to maximize total editing. Briefly, a dosing matrix was set up with RNP comprising the His-AsCpf1-sNLS-sNLS H800A protein (SEQ ID NO: 1032, Table 14) complexed to unmodified HBG1-1 gRNA (SEQ ID NO: 1022, Table 14) (“His-AsCpf1-sNLS-sNLS H800A_HBG1-1 RNP”) being co-delivered at 0-12 μM with OLI16431 (SEQ ID NO: 1040, Table 11) at 0-12 μM. Using a dose of 8 μM His-AsCpf1-sNLS-sNLS H800A_HBG1-1 RNP co-delivered with 8 μM OLI16431, a maximum of 89.4% indels was achieved when measured by sequencing analysis of the HBG PCR product from genomic DNA extracted from cells following 14 days erythroid culture (FIG. 36A). This coincided with an increase in HbF levels to >32% above background under these dosing conditions (FIG. 36A). The viability of this sample (His-AsCpf1-sNLS-sNLS H800A_HBG1-1 RNP [8 μM]+OLI16431 [8 μM]) was comparable to that of the untreated control sample at both 48 hours post electroporation and after 14 days in erythroid culture (FIG. 36B).

[0481] However, as eluded to in Example 13, an artifact was observed when >8 μM OLI16431 was electroporated into the cells alone, without RNP. Under these conditions, there was a false positive result when PCR amplification was performed 48 hour post electroporation, likely due to excessive ssODN within the system (see FIG. 36A, 8 μM and 12 μM for OLI16431 alone at 48 hours (black bars)). At lower doses of ssODN, and at later timepoints, this false positive was no longer apparent (FIG. 36A, 4 μM and 6 μM for OLI16431 alone at 48 hours (black bars) and 4 μM, 6 μM, 8 μM, and 12 μM for OLI16431 alone at 14 days (light grey bars)). In addition, the decrease in cell viability observed with the ssODN alone groups (FIG. 36B, dropping to ˜57% with 12 μM OLI16431 alone at 48 hours (black bars)) may be a compounding factor. That there was no false positive result at ssODN doses of 4 μM and 6 μM suggests that this artifact may be due to excessive ssODN. These factors, along with the baseline HbF levels observed with the 8 μM and 12 μM OLI16431 alone groups (FIG. 36A, grey dots as compared to negative control), provide confidence that the substantial and sustained boost in RNP editing with the addition of ssODN is real and not an artifact.

### Example 22: RNPs Containing Various Cpf1 and 9RNA Targeting the HBG Promoter Region Support Gene Editing in Human Hematopoietic Stem/Progenitor Cells which Promotes Induction of HbF Protein Expression in the Erythroid Progeny

[0482] Guide RNAs comprising SEQ ID NOs:1022, 1023, 1041-1093, 1098-1106 (Table 19) were complexed to various Cpf1 variant enzymes (SEQ ID NOs:1032, 1094-1097, 1107-1109, Table 20) to form various RNP complexes (Table 21). The RNPs contained gRNAs with modifications to the 5′ end and/or modifications to the 3′ end of the gRNA (Table 19). Guide RNAs comprising SEQ ID NOs:1022, 1023, 1041-1084, 1098-1106 (Table 19) have the same expected cleavage site at the distal CCAAT box target region, the related targeting domains contain the sequences set forth in SEQ ID NO: 1002 (HBG1-1), SEQ ID NO: 1254 (HBG1-1-21mer), SEQ ID NO: 1256 (HBG1-1-22mer), SEQ ID NO: 1258 (HBG1-1-23mer), for gRNA comprising a 20 mer, 21 mer, 22 mer, or 23 mer protospacer sequence respectively (Table 22, Table 23). In some cases gRNA targeting other positions within the HBG promoter were also tested, including guide RNAs SEQ ID NOs:1085-1096, comprising targeting domains containing the sequences set forth in SEQ ID NOs:1260 (AsCpf1 HBG1 Promoter-1 (21mer)), SEQ ID NO: 1262 (AsCpf1 HBG1 Promoter-2 (21mer)) or SEQ ID NO: 1264 (AsCpf1 HBG1 Promoter-6 (21mer)) (Table 22, Table 23). Table 21 provides a listing of each RNP tested in Examples 22-24 and the SEQ ID NO of the gRNA and the SEQ ID NO of the Cpf1 variant that form each RNP complex. Additional information about each gRNA and Cpf1 variant may be found in Table 19 and Table 20, respectively.

[0483] The gRNAs used in Examples 22 and 23 were chemically synthesized. Chemicals for oligonucleotide synthesis were purchased from BioAutomation, Glen Research, Millipore Sigma, Sigma-Aldrich, ChemGenes, and Thermo Fisher Scientific. The solid support used for synthesis was either a Unylinker 2000 A CPG resin, a 2′-TBDMS rU 2000 A CPG resin or a 2′-O-methyl adenosine (N-Bz) Icaa 2000 A CPG resin from ChemGenes. RNA (TBDMS-protected) and DNA phosphoramidites were obtained from Thermo Fisher Scientific. In certain embodiments, phosphorothioates were introduced during a sulfurization step with a solution of DDTT (3-((dimethylamino-methylidene)amino)-3H-1,2,4-dithiazole-3-thione) from Glen Research. Oligonucleotides were synthesized using standard RNA and DNA phosphoramidite chemistry on either a BioAutomation MerMade 12 synthesizer or on a GE Äkta OligoPilot 100 synthesizer. Following synthesis, the oligonucleotides were cleaved from the solid support and deprotected in a two-step process using ammonium hydroxide/methylamine and TEA-3HF. After desalting, the oligonucleotides were purified using reversed-phase chromatography on a preparative HPLC.

[0484] First, the effect of editing using RNPs comprising gRNAs with modifications to the 5′ end of the gRNAs was tested. Briefly, RNP complexes (6.0 μM and 12 μM) were delivered to 1×10⁶ mPB CD34+ cells via MaxCyte electroporation, following 48 hours pre-stimulation in X-Vivo 10 media supplemented with SCF, TPO and FLT3. The level of insertions/deletions at the target site was analyzed by Illumina sequencing (NGS) of the PCR amplified target site at 72 hours after electroporation. Results demonstrate that RNPs comprising gRNAs with no modification (RNP33, also referred to as “HBG1-1-AsCpf1 RNP,” Table 14) or modifications to the 5′ end of the gRNA including the addition of 5 nt RNA (RNP37), 10 nt RNA (RNP38), 25 nt RNA (RNP39), 60 nt RNA (RNP40), 5 nt DNA (RNP41), 10 nt DNA (RNP42), 25 nt DNA (RNP43), and 60 nt DNA (RNP44) (Table 21) supports on-target editing (FIG. 37).

[0485] Next, the effect of co-delivery of Cpf1 RNP with Sp182 dead RNP (dead gRNA comprising SEQ ID NO: 1027 (Table 14) complexed with S. pyogenes Cas9 (SEQ ID NO:1033)) or ssODN OLI16431 (SEQ ID NO:1040, Table 11) was tested. Briefly, a dosing matrix with RNP33 (no 5′ or 3′ gRNA modification, Table 21) complexes at varying concentrations (6 μM, 8 μM, 8 μM, and 12 μM) were co-delivered with Sp182 RNP (8 μM, 8 μM, 6 μM, and 4 μM) or ssODN OLI16431 (8 μM, 8 μM, 6 μM, and 4 μM) to 5.25×10⁶ mPB CD34+ cells via MaxCyte electroporation, following 48 hours pre-stimulation in X-Vivo 10 media supplemented with SCF, TPO and FLT3. Following electroporation, cells were placed back to culture for a further 48 hours. Then, a fraction of the CD34 cells were split for gDNA extraction and indel quantification in the bulk cell population. In addition, to investigate the editing in phenotypic progenitors and phenotypic hematopoietic stem cells (HSCs), HSPC subpopulations were characterized (amongst the remainder CD34 cells) by immune-phenotyping (Notta 2011) and separated by fluorescence Activated Cell Sorting (FACS). Immune phenotyping at 48 hours post electroporation was performed by staining cells with antibodies against hCD34, hCD38, hCD45RA, hCD90, and hCD123. Phenotypic HSCs were defined as hCD34bright hCD38 hCD90+ hCD45RA−, and progenitors were defined as hCD34bright CD38+. These two populations were sorted by FACS and DNA was extracted to determine the editing levels in these sub-populations. The level of insertions/deletions at the target site was analyzed by Illumina sequencing (NGS) of the PCR amplified target. Results demonstrate that RNP33 co-delivered with the “booster elements” Sp182 RNP or ssODN OLI16431 support on-target editing (FIGS. 38A-B) at levels higher than those observed when delivering RNP33 alone (FIG. 37).

[0486] Next, the effect of co-delivery of RNP33 (no 5′ or 3′ gRNA modification, Table 21), RNP43 (+25 DNA 5′ gRNA modification, Table 21) or RNP34 (1×PS2-OMe+1×OMe 3′ gRNA modifications, Table 21) with Sp182 dgRNA (Table 15) or ssODN OLI16431 (Table 11) was tested. Briefly, RNP33, RNP34, or RNP43 complexes (8 μM) were co-delivered with Sp182 RNP (8 μM) or ssODN OLI16431 (8 μM) to 5.25×10⁶ mPB CD34+ cells via MaxCyte electroporation, following 48 hours pre-stimulation in X-Vivo 10 media supplemented with SCF, TPO and FLT3. Following electroporation, cells were placed back to culture for a further 48 hours prior to sorting into phenotypic progenitor and phenotypic HSC fractions for indel quantification. The level of insertions/deletions at the target site was analyzed by Illumina sequencing (NGS) of the PCR amplified target site at 48 hours after electroporation. Results demonstrate that RNPs containing gRNAs with 5′ modification or 3′ modifications co-delivered with the “booster elements” Sp182 RNP or ssODN OLI16431 support on-target editing (FIG. 39). Both booster elements tested provided comparable editing levels to RNP34 and RNP33. When compared to editing levels obtained without the booster element, while RNP33 editing was enhanced by both booster elements, RNP43 editing was however only increased with the addition of Sp182 RNP (FIGS. 37, 39).

[0487] Next the effect of different Cpf1 proteins on RNP editing was tested. A stoichiometric comparison (gRNA:Cpf1) with RNPs comprising various Cpf1 proteins was performed. Briefly, RNPs (RNP64, RNP63, RNP45, Table 21) were delivered at a stoichiometry (gRNA:Cpf1 complexation ratio) of either 2 or 4, where the gRNA is in a molar excess. All RNPs were delivered via MaxCyte electroporation at 8 μM to 1×10⁶ CD34+ cells following 48 hours pre-stimulation in X-Vivo 10 media supplemented with SCF, TPO and FLT3. Following electroporation, cells were placed back to culture for a further 72 hours prior to indel quantification. Results demonstrated that there was no difference in editing rates with altered stoichiometry at the concentration tested (FIG. 40). RNP45 (comprising Cpf1 protein SEQ ID NO: 1094) outperforms RNP63 (comprising Cpf1 protein SEQ ID NO: 1095) and RNP64 (comprising Cpf1 SEQ ID NO: 1109).

[0488] Next, the effect of Sp182 RNP or ssODN OLI16431 co-delivery with various RNPs containing different Cpf1 proteins was tested. Briefly, RNPs (RNP33, RNP64, RNP63, RNP45, Table 21) were delivered alone or in combination with Sp182 RNP or ssODN OLI16431. All reagents were delivered via MaxCyte electroporation at 8 μM to 1×10⁶ CD34+ cells following 48 hours pre-stimulation in X-Vivo 10 media supplemented with SCF, TPO and FLT3. Following electroporation, cells were placed back to culture for a further 72 hours prior to indel quantification. Results indicate the “booster elements” Sp182 RNP or ssODN OLI16431 enhanced editing for all RNPs tested (FIG. 41).

[0489] The effect of editing using RNPs containing gRNAs with various 5′ DNA extensions, or RNP without a 5′ DNA extension (RNP45) co-delivered with or without ssODN OLI16431 was tested. Briefly, following 48 hours pre-stimulation in X-Vivo 10 media supplemented with SCF, TPO and FLT3, RNPs (RNP45 (no 5′ modification), RNP46, RNP47, RNP48, RNP49, RNP50, RNP51, RNP52, RNP53, RNP54, RNP55, RNP56, and RNP57, Table 21) at a concentration of 8 μM were delivered alone or co-delivered with 8 μM ssODN OLI16431 via MaxCyte electroporation to 1×10⁶ CD34+ cells. Following electroporation, cells were placed back to culture prior to indel quantification. Results demonstrate that all RNPs support on-target editing (FIG. 42).

[0490] The effect of editing using RNPs including gRNAs having the same 5′ DNA extension but different 3′ gRNA modifications was tested to assess the impact of 3′ gRNA modifications. Briefly, RNPs comprising gRNAs with matched 5′ ends, but different 3′ gRNA modifications (RNP49 vs. RNP58 and RNP59 v. RNP60) were delivered at a concentration of 8 μM via MaxCyte electroporation to 1×10⁶ CD34+ cells following 48 hours pre-stimulation in X-Vivo 10 media supplemented with SCF, TPO and FLT3. Following electroporation, cells were placed back to culture prior to indel quantification. In both comparisons, RNPs containing gRNA with 3′ PS-OMe outperformed the unmodified 3′ version at 24 h post electroporation (FIG. 43).

[0491] Next, different concentrations of Cpf1 and gRNA for RNP58 were tested. Briefly, RNP58 (+25 DNA 5′ gRNA modification and 1×PS-OMe 3′ gRNA modification, Table 21) was delivered via MaxCyte electroporation to 1×10⁶ CD34+ cells following 48 hours pre-stimulation at a stoichiometry (gRNA:Cpf1 complexation ratio) of either 2:1, 1:1 or 0.5:1 molar ratios. Following electroporation, cells were placed back to culture prior to indel quantification. At all doses tested, editing was best when RNP was complexed at a 2:1 ratio (FIGS. 44A-B).

[0492] The effect of editing using RNPs including gRNAs having the same 5′ DNA extension but different 3′ gRNA modifications was further tested to assess the impact of 3′ gRNA modifications. Briefly, RNPs comprising gRNAs with matched 5′ ends, but different 3′ gRNA modifications (RNP58, RNP2, RNP3, RNP4, RNP5, RNP6, RNP7, RNP8, RNP9, RNP10) were delivered at varying concentrations (1 μM, 2 μM, 4 μM) via MaxCyte electroporation to 1×10⁶ CD34+ cells following 48 hours pre-stimulation. Following electroporation, cells were placed back to culture prior to indel quantification. Results indicate that all RNPs support on-target editing (FIGS. 45A-B).

[0493] Next, editing by RNPs that include gRNAs with 3′ gRNA modifications or 5′ and 3′ modifications that target various regions of the HBG promoter were tested. Those include guide RNAs SEQ ID NOs:1085-1096, comprising targeting domains SEQ ID NOs:1260 (AsCpf1 HBG1 Promoter-1 (21mer)), 1262 (AsCpf1 HBG1 Promoter-2 (21mer)), 1264 (AsCpf1 HBG1 Promoter-6 (21mer)) (Table 22, Table 23). Instead of the distal CCAAT box target region, those gRNAs are configured to provide an editing event within regions selected from Table 17. Briefly, RNPs including gRNAs containing an unmodified 5′ gRNA and a 1×PS-OMe 3′ gRNA modification (RNP11, RNP16, RNP19, and RNP22, Table 21), RNPs including gRNAs containing a +20 DNA+2×PS 5′ gRNA modification and a 1×PS-OMe 3′ gRNA modification (RNP12, RNP21, and RNP24, Table 21), RNPs including gRNAs containing a +25 DNA 5′ gRNA modification and a 1×PS-OMe 3′ gRNA modification (RNP58 and RNP20, Table 21) were delivered at a concentration of 8 μM via MaxCyte electroporation to 1×10⁶ CD34+ cells following 48 hours pre-stimulation in X-Vivo 10 media supplemented with SCF, TPO and FLT3. Following the editing of mPB CD34+ cells, ex vivo differentiation into the erythroid lineage was performed for 18 days (Giarratana 2011), with gDNA being isolated on day 14 of culture for indel analysis. Briefly, RNP was delivered to CD34+ cells, as described above. Following 48 hours recovery in X-Vivo 10 media supplemented with SCF, TPO and FLT3, the treated cells were counted and transferred to erythroid differentiation media, with cell counts and feeds occurring on days 4, 7, 10 and 14, with erythroid collection at day 18. These CD34+ derived erythroid cells were then counted and lysed in HPLC grade water, before filtering to removed cell debris. Then, relative expression levels of gamma-globin chains (over total beta-like globin chains) was measured for each sample by UPLC, with protein separation being achieved by gradually increasing the ratio of acetonitrile with 0.1% trifluoroacetic acid, to water with 0.10% trifluoroacetic acid (FIGS. 46A-C). FIGS. 46A-C showed all RNP supported on-target editing. However only editing at certain target sites give rise to increased HBF expression. The same experiment was performed with varying concentrations (0, 1 μM, 2 μM, 4 μM) of RNP58 (FIG. 47).

[0494] Next the effect of different Cpf1 proteins on RNP editing was tested. Briefly, RNP58, RNP26, RNP27, and RNP28 (Table 21) including gRNAs comprising SEQ ID NO:1051 (+25 DNA 5′ gRNA modification and a 1×PS-OMe 3′ gRNA modification, Table 19) complexed with varying Cpf1 proteins were delivered via MaxCyte electroporation at 8 μM to 1×10⁶ CD34+ cells following 48 hours pre-stimulation in X-Vivo 10 media supplemented with SCF, TPO and FLT3. Results demonstrated that all RNPs support on-target editing (FIG. 48).

[0495] Next the effect of different RNPs containing gRNAs with various 5′ gRNA modifications and the same 3′ modification was tested. Briefly, RNPs (RNP58 (+25 DNA 5′ gRNA modification and a 1×PS-OMe 3′ gRNA modification), RNP29 (+25 DNA+2×PS 5′ gRNA modification and a 1×PS-OMe 3′ gRNA modification), RNP30 (PolyA RNA+2×PS 5′ gRNA modification and a 1×PS-OMe 3′ gRNA modification), and RNP31 (PolyU RNA+2×PS 5′ gRNA modification and a 1×PS-OMe 3′ gRNA modification) (Table 21)) were delivered via MaxCyte electroporation at 1 μM, 2 μM, or 4 μM to 1×10⁶ CD34+ cells following 48 hours pre-stimulation in X-Vivo 10 media supplemented with SCF, TPO and FLT3 (RNP30 was not tested at 1 μM due to availability of cells). Results demonstrated that all RNPs support on-target editing (FIG. 49).

[0496] Next the effect of different Cpf1 proteins on RNP editing was tested. Briefly, RNP58, RNP27, and RNP26 (Table 21) including gRNAs comprising SEQ ID NO:1051 (+25 DNA 5′ gRNA modification and a 1×PS-OMe 3′ gRNA modification, Table 19) complexed with varying Cpf1 proteins were delivered via MaxCyte electroporation at 2 μM or 4 μM to 1×10⁶ CD34+ cells following 48 hours pre-stimulation in X-Vivo 10 media supplemented with SCF, TPO and FLT3. To investigate the editing in bulk CD34, phenotypic progenitors, and phenotypic hematopoietic stem cells (HSCs), HSPC subpopulations were characterized. Thus, following electroporation, cells were placed back to culture for a further 48 hours prior to sorting into progenitor and HSC fractions for indel quantification. The level of insertions/deletions at the target site was analyzed by Illumina sequencing (NGS) of the PCR amplified target site at 48 hours after electroporation. Results demonstrated that all RNPs support on-target editing in bulk CD34, phenotypic progenitors, and phenotypic hematopoietic stem cells (FIG. 50).

[0497] Next, the effect of co-delivery of RNP with Sp182 RNP (dead gRNA comprising SEQ ID NO: 1027 (Table 14) complexed with S. pyogenes Cas9 (SEQ ID NO: 1033)) or ssODN OLI16431 (SEQ ID NO: 1040, Table 11) on RNP containing different Cpf1 proteins was tested. Briefly, RNP61, RNP62, RNP34 (Table 21) were co-delivered at 8 μM with Sp182 RNP (8 μM) or ssODN OLI16431 (8 μM) to 25×10⁶ mPB CD34+ cells via MaxCyte electroporation, following 48 hours pre-stimulation in X-Vivo 10 media supplemented with SCF, TPO and FLT3. To investigate the editing in bulk CD34, phenotypic progenitors, and phenotypic hematopoietic stem cells (HSCs), HSPC subpopulations were characterized. Thus, following electroporation, cells were placed back to culture for a further 48 hours prior to sorting into progenitor and HSC fractions for indel quantification. The level of insertions/deletions at the target site was analyzed by Illumina sequencing (NGS) of the PCR amplified target site at 48 hours after electroporation. Results demonstrate that RNP co-delivered with the “booster elements” Sp182 RNP or ssODN OLI16431 support on-target editing (FIG. 51). A fraction of these cells were also cryopreserved 24 hours post electroporation to be further characterized in an in vivo engraftment model (see Example 23).

[0498] Next, the effect of RNP58 and RNP32 editing was tested. Briefly, RNP58 and RNP32 (Table 21) were delivered at 2 μM to 6×10⁶ mPB CD34+ cells via MaxCyte electroporation, following 48 hours pre-stimulation in X-Vivo 10 media supplemented with SCF, TPO and FLT3. To investigate the editing in bulk CD34, phenotypic progenitors, and phenotypic HSCs, HSPC subpopulations were characterized. Thus, following electroporation, cells were placed back to culture for a further 48 hours prior to sorting into progenitor and HSC fractions for indel quantification. The level of insertions/deletions at the target site was analyzed by Illumina sequencing (NGS) of the PCR amplified target site at 48 hours after electroporation. Results demonstrate that RNP58 and RNP32 support on-target editing (FIG. 52).

[0499] RNP58 and RNP1 (Table 21) were delivered at concentrations of 2 μM to 8 μM to 25×10⁶ mPB CD34+ cells via MaxCyte electroporation, following 48 hours pre-stimulation in X-Vivo 10 media supplemented with SCF, TPO and FLT3. To investigate the editing in bulk CD34, phenotypic progenitors, and phenotypic hematopoietic stem cells (HSCs), HSPC subpopulations were characterized. Thus, following electroporation, cells were placed back to culture for a further 48 hours prior to sorting into progenitor and HSC fractions for indel quantification. The level of insertions/deletions at the target site was analyzed by Illumina sequencing (NGS) of the PCR amplified target site at 48 hours after electroporation. Results demonstrate that the RNP tested support on-target editing (FIG. 53). A fraction of these cells were also cryopreserved 24 hours post electroporation for further characterized in an in vivo engraftment model (see Example 23).

### Example 23: Infusion of Edited mPB CD34+ Cells into NOD,B6.SCID Il2rγ−/− Kit(W41/W41) Mice Results in Long Term Engraftment and HbF Induction

[0500] To determine whether delivery of RNP34 and RNP33 (Table 21) co-delivered with ssODN OLI16431 (SEQ ID NO:1040, Table 11) achieves edits in long term repopulating hematopoietic stem cells, human adult CD34+ cells from mobilized peripheral blood (mPB) were infused into nonirradiated NOD,B6.SCID Il2rγ−/− Kit(W41/W41) (Jackson lab stock name: NOD.Cg-Kit<W-41J>Tyr<+> Prkdc<scid> Il2rg<tm1Wjl>/ThomJ) (“NBSGW”) mice. Briefly, mPB CD34+ cells at 62.5×10⁶/mL were electroporated via MaxCyte electroporation with RNP at a dose of 8 μM and 6 μM ssODN OLI16431 following 48 hours pre-stimulation in X-Vivo 10 media supplemented with SCF, TPO and FLT3. After 24 hours, mCD34+ cells were cryopreserved. Five days later, mPB CD34+ cells were thawed and infused into NBSGW mice at 1 million cells per mouse via intravenous tail vein injection. Eight weeks later, mice were euthanized and bone marrow (BM) was collected from femurs, tibias, and pelvic bones. Bone marrow sub-populations of cells respectively identified as CD15+, CD19+, glycophorin A (GlyA, CD235a+), and lineage-negative CD34+ were isolated by FACS, and DNA was extracted to determine the editing levels in each of these fractions. FIG. 54 depicts the frequency of indels, as determined by next generation sequencing, of unfractionated BM, or flow-sorted individual BM sub-populations.

[0501] Next, to determine whether delivery of RNP34 or RNP33 (Table 21) co-delivered with Sp182 RNP (dead gRNA comprising SEQ ID NO: 1027 (Table 14) complexed with S. pyogenes Cas9 (SEQ ID NO: 1033)) achieves edits in long term repopulating hematopoietic stem cells, human adult CD34+ cells from mobilized peripheral blood (mPB) were infused into nonirradiated NBSGW mice. Briefly, mPB CD34+ cells at 62.5×10⁶/mL were electroporated via MaxCyte electroporation with RNP at varying doses and varying doses of Sp182 RNP following 48 hours pre-stimulation in X-Vivo 10 media supplemented with SCF, TPO and FLT3. After 24 hours, mCD34+ cells were cryopreserved. Five days later, mPB CD34+ cells were thawed and infused into NBSGW mice at 1 million cells per mouse via intravenous tail vein injection. Eight weeks later, mice were euthanized and bone marrow (BM) was collected from femurs, tibias, and pelvic bones. Bone marrow sub-populations of cells respectively identified as CD15+, CD19+, glycophorin A (GlyA, CD235a+), and lineage-negative CD34+ were isolated by FACS, and DNA was extracted to determine the editing levels in each of these fractions. FIG. 55A depicts the frequency of indels, as determined by next generation sequencing, of unfractionated BM, or flow-sorted individual BM sub-populations.

[0502] Lastly, long term HbF induction by BM-derived CD34+ cells was analyzed. An aliquot of BM cells were cultured under erythroid differentiation conditions for 18 days (Giarratana 2011), and evaluated for HbF expression by UPLC. Briefly, unfractionated BM cells extracted from mice 8 weeks after infusion were placed in erythroid culture conditions for 18 days. Cell counts and feeds occurred on days 7, 10 and 14, with erythroid collection at day 18. These bone marrow derived erythroid cells were then counted and lysed in HPLC grade water before filtering to removed cell debris. Then, relative expression levels of gamma-globin chains (over total beta-like globin chains) was measured for each sample by UPLC, with protein separation being achieved by gradually increasing the ratio of acetonitrile with 0.1% trifluoroacetic acid, to water with 0.10% trifluoroacetic acid (FIG. 54B). These data demonstrate that robust long-term HbF induction is achieved by RNP34 and RNP33 co-delivered with Sp182 RNP editing of human CD34+ cells.

[0503] Next, to determine whether delivery of RNP61 or RNP62 (Table 21) co-delivered with ssODN OLI16431 (SEQ ID NO:1040, Table 11) achieves edits in long term repopulating hematopoietic stem cells, human adult CD34+ cells from mPB were infused into nonirradiated NBSGW mice. Briefly, mPB CD34+ cells at 62.5×10⁶/mL were electroporated via MaxCyte electroporation with 8 μM RNP and 8 μM ssODN OLI16431 following 48 hours pre-stimulation in X-Vivo 10 media supplemented with SCF, TPO and FLT3. After 24 hours, mCD34+ cells were cryopreserved. Four days later, mPB CD34+ cells were thawed and infused into NBSGW mice at 1 million cells per mouse via intravenous tail vein injection. Eight weeks later, mice were euthanized and bone marrow (BM) was collected from femurs, tibias, and pelvic bones. Bone marrow sub-populations of cells respectively identified as CD15+, CD19+, glycophorin A (GlyA, CD235a+), and lineage-negative CD34+ were isolated by FACS, and DNA was extracted to determine the editing levels in each of these fractions. FIG. 56A depicts the frequency of indels, as determined by next generation sequencing, of unfractionated BM, or flow-sorted individual BM sub-populations.

[0504] Lastly, long term HbF induction by BM-derived CD235a+ (GlyA+) erythroid cells was analyzed. An aliquot of BM cells were cultured under erythroid differentiation conditions for 18 days and evaluated for HbF expression by UPLC. Briefly, unfractionated BM cells extracted from mice 8 weeks after infusion were placed in erythroid culture conditions for 18 days. FIG. 56B depicts the HbF expression, calculated as gamma/beta-like chains (%) by erythroid cells. These data demonstrate that robust long-term HbF induction is achieved by RNP61 and RNP62 co-delivered with ssODN OLI16431 editing of human CD34+ cells.

[0505] Next, to determine whether delivery of RNP1 or RNP58 (Table 21) achieves edits in long term repopulating hematopoietic stem cells, human adult CD34+ cells from mPB were infused into nonirradiated NBSGW mice. Briefly, mPB CD34+ cells at 62.5×10⁶/mL were electroporated via MaxCyte electroporation with 4 μM or 8 μM RNP1 or 2 μM, 4 μM, or 8 μM RNP58 following 48 hours pre-stimulation in X-Vivo 10 media supplemented with SCF, TPO and FLT3. After 24 hours, mCD34+ cells were cryopreserved. Four days later, mPB CD34+ cells were thawed and infused into NBSGW mice at 1 million cells per mouse via intravenous tail vein injection. Eight weeks later, mice were euthanized and bone marrow (BM) was collected from femurs, tibias, and pelvic bones. Human chimerism and lineage reconstitution (CD45+, CD14+, CD19+, glycophorin A (GlyA, CD235a+), lineage, and CD34+, and mouse CD45+ marker expression) in BM was determined by flow cytometry and analyzed (FIG. 57). The frequency of GlyA+ cells was calculated as GlyA+ cells/total cells in BM. Human chimerism was defined as human CD45/(human CD45+mCD45).

[0506] Similar chimerism and lineage distributions were achieved 8-weeks post-transplant by RNP-transfected mPB CD34+ cells compared to mock-transfected mPB CD34+ cells demonstrating that editing is comparable with retaining the engraftment potential of hematopoietic stem cells. FIG. 58 depicts the indels, as determined by next generation sequencing, of unfractionated BM, at 8 weeks post-infusion. FIG. 59 shows the frequency of indel rate in BM, CD15+, CD19+, glycophorin A (GlyA, CD235a+), and lin−CD34+ cells with 2 μM, 4 μM, or 8 μM of RNP58.

[0507] Long term HbF induction by CD235a+ (GlyA+) erythroid cells, derived from edited CD34+ cells was also analyzed. GlyA+ cells obtained from bone marrow, were isolated by fluorescence Activated Cell Sorting (FACS), collected and lysed in HPLC grade water. Lysates were then evaluated for HbF expression by UPLC. FIG. 60 depicts the HbF expression, calculated as gamma/beta-like chains (%) by GlyA+ cells. These data demonstrate that robust long-term HbF induction is achieved RNP58 editing of human CD34+ cells at various RNP58 concentrations.

[0508] Importantly, CD34+ cells that were electroporated with varying concentrations of RNP1 or RNP58 maintained their ex vivo hematopoietic activity (i.e., no difference in the quantity or diversity of erythroid and myeloid colonies compared to untreated donor matched CD34+ cell negative control), as determined in hematopoietic colony forming cell (CFC) assays (FIG. 61).

### Example 24: NHEJ Mediated Deletions of 4 Nucleotides or Larger at the Distal CCAAT Box Region of HBG Promoter are Maintained Long-Term and Promote Elevated HbF Expression

[0509] Delivery of RNP containing the Cas9 or Cpf1 enzyme targeting the HBG promoter region (FIG. 63A) results in the generation of a multitude of insertions and deletions (indels). These include indels derived from microhomology mediated end joining (MMEJ) and non-homologous end joining (NHEJ) repair mechanisms. As shown below, the MMEJ repair mechanism is not well utilized during editing of the long-term stem cell population (HSC) and this type of edit is lost over time.

[0510] Briefly, mPB CD34+ cells at 62.5×10⁶/mL were electroporated via MaxCyte electroporation with Sp35 RNP following 48 hours pre-stimulation in X-Vivo 10 media supplemented with SCF, TPO and FLT3. Sp35 RNP comprises Sp35 gRNA (comprising the targeting domain of SEQ ID NO:339 (i.e., CUUGUCAAGGCUAUUGGUCA (RNA)); SEQ ID NO:917 (i.e., CTTGTCAAGGCTATTGGTCA (DNA)) complexed with S. pyogenes wildtype (Wt) Cas9 protein. After 24 hours, an aliquot of mPB CD34+ cells was collected for pre-infusion (CD34) indel analysis, another aliquot was placed in erythroid differentiation for indel analysis in the progeny of erythroid progenitors. The rest of the cells were cryopreserved and stored in liquid nitrogen until the initiation of the engraftment study. At the time of infusion, mPB CD34+ cells were thawed and infused into nonirradiated NOD,B6.SCID Il2rγ−/− Kit(W41/W41) (Jackson lab stock name: NOD.Cg-Kit<W-41J>Tyr<+>Prkdc<scid> Il2rg<tm1Wjl>/ThomJ) (“NBSGW”) mice at 1 million cells per mouse via intravenous tail vein injection. Sixteen weeks later, mice were euthanized and bone marrow (BM) was collected from femurs, tibias, and pelvic bones and lineage-negative CD34+ were isolated by FACS, and DNA was extracted from cells collected at pre-infusion, in their erythroid progeny (derived in vitro) and in cells collected at 16 weeks in vivo to determine the indels (insertions/deletions) using the following primers: Forward=CATGGCGTCTGGACTAGGAG (SEQ ID NO: 1266) and Reverse=AAACACATTTCACAATCCCTGAAC (SEQ ID NO: 1267). The read sequence surrounding every detected deletion was analyzed to identify whether it was likely the result of DSB repair by MMEJ or NHEJ pathways. MMEJ is distinguished from NHEJ by its use of microhomology sequences. MMEJ repair relies on strand resection and annealing of proximally located repeated stretches of nucleotides (microhomologies), surrounding the DSB. The resulting deletion removes one of the microhomology sequences together with the entire intervening sequence between the two microhomologies. Thus, probable MMEJ-mediated deletion can be identified by searching for the presence of a nucleotide sequence at either end of the deleted sequence that is repeated in the region immediately flanking the other end of the deletion. Based on this, deletions were classified as “MMEJ” if stretches of 2 base pairs (bp) or more were detected at the deletion boundary and repeated in the region immediately flanking the other end of the deletion. All other deletions were classified as NHEJ.

[0511] Prior to infusion, ˜30% of indels were derived from MMEJ repair (FIG. 63B, CD34, black striped bar=MMEJ, white bar=NHEJ). In erythroid progenitors (based on indels detected after erythroid differentiation of CD34 cells), MMEJ indels represented ˜36% of indels (FIG. 63B, Prog, black striped bar=MMEJ, white bar=NHEJ). Following 16 weeks engraftment, the majority of the MMEJ indels were lost (FIG. 63B, HSC, black striped bar=MMEJ, white bar=NHEJ) with the NHEJ derived edits being maintained. This observation has also been observed by others (Bauer 2019, Wu 2019, Weber 2020), and does not appear to be site specific. It was attributed to the transition from a predominant population of actively cycling, and MMEJ-prone short-lived progenitors that constitute most of the CD34+ cells pre-infusion, to the output of more quiescent (and less MMEJ-prone) self-renewing hematopoietic stem cells (HSCs) at later timepoints in vivo. While HSCs provide hematopoietic reconstitution post-engraftment long-term, they represent a very rare population within the CD34+ bulk population pre-infusion. This finding highlights the need to use an editing tool that generates HbF-inducing indels through NHEJ-mediated repair rather than MMEJ repair to achieve durable HbF expression.

[0512] In addition, genotype to phenotype analysis at the distal CCAAT-box region of the HBG1/2 promoters identified mutations leading to most elevated HbF expression. A single cell experiment was performed to evaluate the distribution of gamma chain expression levels in erythroid cells derived from mPB CD34+ cells edited at the distal CCAAT box region. Indels were generated at this site using either Sp35 RNP or RNP34 (Table 21)+Sp182-Cas9-RNP (FIG. 27F, Table 14). Briefly, mPB CD34+ cells at 6.25×10⁶/mL (100 μl) were electroporated via MaxCyte electroporation with 4 μM Sp35 RNP or 8 μM HBG1-1-AsCpf1H800A-RNP co-delivered with 8 μM Sp182-Cas9-RNP (all RNPs at a molar ratio of 4:1 gRNA:RNA guided nuclease) following 48 hours pre-stimulation in X-Vivo 10 media supplemented with SCF, TPO and FLT3. Sp35 RNP comprises Sp35 gRNA (comprising the targeting domain of SEQ ID NO:339 (i.e., CUUGUCAAGGCUAUUGGUCA (RNA)); SEQ ID NO:917 (i.e., CTTGTCAAGGCTATTGGTCA (DNA)) complexed with S. pyogenes wildtype (Wt) Cas9 protein. RNP34 comprises HBG1-1-AsCpf1H800A-RNP (composed of His-AsCpf1-sNLS-sNLS-H800A (SEQ ID NO: 1032) complexed to HBG1-1 gRNA with a 3′ modification as shown in Table 14 (SEQ ID NO:1041)). After being left to recover for 48 hours post-electroporation, the cells were sorted by Fluorescence Activated Cell Sorting (FACS) at 1-cell/well in non-tissue culture treated 384-well plates. The cells were then differentiated and expanded clonally for 18 days into the erythroid lineage (adapted from Giarratana 2011). UPLC analysis was performed to determine the distribution of G-gamma chain expression levels (percentage of G-gamma/[total beta-like chains]) in the clonal erythroid progeny of cells derived from the total population of mPB-CD34+ cells initially edited. Sequencing analysis (allele identification and detection of indels using the following primers: Forward=CATGGCGTCTGGACTAGGAG (SEQ ID NO: 1266) and Reverse=AAACACATTTCACAATCCCTGAAC (SEQ ID NO: 1267)) and ddPCR (loss of 4.9 kb fragment deleting g-Gamma coding sequence) was performed on gDNA from an aliquot of each clonal culture collected on day 14, prior to enucleation, and enabled identification of clones containing only one allele coding for G-gamma, in association with a specific indel. Indels disrupting more than 3 nucleotides were generally associated with more elevated HbF expression compared to smaller indels (FIG. 63C). This finding highlights that using an editing tool that generates larger deletions at the distal CCAAT box region will provide more elevated levels of HbF expression, likely by more effectively disrupting the binding at this site of regulatory factors repressing HBG expression. Notably, most of the larger deletions evaluated were detected in clones derived from the CD34 cells edited with the Cpf1 RNP, while most of the smaller deletions evaluated were detected from clones derived from the CD34 cells edited with the Cas9 RNP (FIG. 63D), suggesting that larger indels occur more frequently with the Cpf1, leading to a potentially higher fraction of cells with elevated HbF in the erythroid progeny of CD34 cells edited with Cpf1 compared to Cas9. Consistent with this result, distribution of gamma chain expression levels (percentage of gamma chains/[total beta-like chains]) in the clonal erythroid progeny of cells derived from the total population of mPB-CD34+ cells initially edited by either the Cpf1 or Cas9 RNP showed a higher frequency of cells with high HbF in the Cpf1 sample compared to the spCas9 sample (FIG. 63E). Of the clones analyzed derived from the CD34+ cells edited with the Cpf1 RNP, 83.1% had gamma chains levels above the median level detected in erythroid clones derived from mock electroporated mPB CD34+ cells (median value=18.8%), 64.2% had gamma chains levels exceeding 30% of total beta-like and 35.8% had gamma chains levels exceeding 48.8% of total beta-like (30%+18.8% median level in control cells). Of the clones analyzed derived from the CD34+ cells edited with the Cas9 RNP, 71.4% had gamma chains levels above the median level detected in erythroid clones derived from mock electroporated mPB CD34+ cells (median value=18.8%), 49.5% had gamma chains levels exceeding 30% of total beta-like and 23.1% had gamma chains levels exceeding 48.8% of total beta-like (30%+18.8% median level in control cells).

### Example 25: Cpf1 RNP Targeting the Distal CCAAT Box Region of the HBG Promoter is Efficient at Generating Durable NHEJ Mediated Deletions of 4 Nucleotides or Larger

[0513] RNP, consisting of guide RNA targeting the distal CCAAT box region of the HBG promoter complexed with either Cpf1 or Cas9 enzyme was electroporated into mobilized peripheral blood (mPB) derived CD34+ cells using the MaxCyte GT (MaxCyte, Inc.) electroporation device. Briefly, mPB CD34+ cells at 62.5×10⁶/mL were electroporated with 4 μM Sp35 RNP (at a molar ratio of 2:1 gRNA:RNA-guided nuclease) or 8 μM RNP58 (Table 21) (at a molar ratio of 4:1 gRNA:RNA-guided nuclease) following 48 hours pre-stimulation in X-Vivo 10 media supplemented with SCF, TPO and FLT3. Sp35 RNP comprises Sp35 gRNA (comprising the targeting domain of SEQ ID NO:339 (i.e., CUUGUCAAGGCUAUUGGUCA) (RNA)); SEQ ID NO:917 (i.e., CTTGTCAAGGCTATTGGTCA) (DNA)) complexed with S. pyogenes wildtype (Wt) Cas9 protein.

[0514] The level and profile of insertions/deletions at the target site was analyzed 24 hours after electroporation. The fraction of small indels present in the samples was assessed by Illumina amplicon sequencing (ILL-seq), following library preparation method and analysis. A 15 bp window around the expected cut site was used in the analysis to calculate editing rates. The oligonucleotides and amplicon used to generate the targeted amplicon sequencing products are provided in FIG. 77A and FIG. 77B.

[0515] To characterize editing by RNP32, the indels generated in each sample were analyzed and processed. The results were summarized by looking at 1) percentage deletion for each base within the target region, 2) distribution of insertion and deletion center positions, and 3) distribution of insertion and deletion lengths. To perform these analyses, the cigar strings for the reads in the alignment bam files were processed, using the following steps:
[0516] 1) Group indels appearing in the same read.
[0517] 2) Create indel_id for indels from each read. Indel_id is a string identifying the indel, shown as indel_start_position+_+indel_length+_+ID. Where ID is NA for deletions and for insertions is the sequence inserted. See example in FIG. 77D.
[0518] 3) Group reads with the same indel_id.
[0519] 4) Count number of reads with the same indels and calculate their total fractions (including wt) and fractions in indels (excluding wt). Fractions in indels allow for a comparison between samples when they have different amounts of total editing.

[0520] Deletions were classified as “MMEJ” if stretches of 2 base pairs or more were deletion boundary and repeated in the region immediately flanking the other end of the deletion. All other deletions were classified as NHEJ. Table 31 shows the indels detected in the samples edited by RNP58 or Sp35 RNP.

[0521] Delivery of RNP containing the Cas9 or Cpf1 enzyme targeting the HBG promoter region (FIG. 63A) results in the generation of a multitude of insertions and deletions (indels). Different enzymes have different mechanistic properties; including relative to their engagement with the DNA target site and their cleavage activity, and leave different DNA ends that impact the repair outcome (Sternberg 2014, Strohkendl 2018, Swarts 2018). Notably, Cpf1 editing results in a four nucleotide 5′ overhang, which is quite different from the blunt ends of SpCas9 edits (see FIG. 63A).

[0522] Evaluation of the editing profile mediated by a Cpf1 and Cas9 RNP targeting the distal box (RNP58 and Sp35RNP, respectfully) showed that indels generated by both enzymes were generally centered at the distal CCAAT box region (FIG. 64H), and the most commonly deleted base was at position TSS:−113 for both RNPs (FIGS. 64E and 64F). However, evaluation of individual indels, as defined by their position relative the HBG-TSS, length, and sequence in the case of insertions, demonstrates differences in the editing outcome after editing this site with the SpCas9 or Cpf1 RNP. FIGS. 64C and 64D show the top 20 indels generated by the Cpf1 and Cas9 RNP, respectively. The most abundant indel generated by Cas9 was the MMEJ-meditated 13 bp deletion 157_−13_NA (HBG1/2 c.−102 to −114, Table 31), more commonly known as the 13 bp HPFH deletion, detected at 31.88% in the Cas9 sample compared to 3.36% in the Cpf1 sample (FIGS. 64D and 64C, respectively). The most abundant indel generated by Cpf1, was the MMEJ mediated 18 nt deletion 159_−18_NA (HBG1/2 c.−104 to −121, Table 31), which was detected at 18.53% in the Cpf1 sample compared to 1.35% in the Cas9 sample (FIGS. 64C and 64D, respectively). The five most common NHEJ indels detected in each sample were deletions of 3 to 7 bp in length for the Cpf1 sample and were deletions of 1 to 4 bp and a 1 bp insertion for Cas9 (FIGS. 64C and 64D, respectively). The full list of indels detected at >0.1% in any of the two samples is shown in Table 31.

[0523] While most indels detected at >0.1% in any of the two samples were also detected in the other sample (above or below 0.1%), their relative frequencies amongst all indels were different depending on the enzyme (Table 31 and FIG. 64I). Notably, insertions were detected at 14.09% in the Cas9 (Sp35 RNP) sample but were rarely detected in the Cpf1 (RNP58) sample (0.47%). Also, larger indels were enriched in CD34 cells edited with the Cpf1 RNP (RNP58) compared to the Cas9 RNP (Sp35 RNP) (FIG. 64J). FIG. 64G shows the distribution of indel length generated by each RNP, and FIG. 64A shows the distribution of indel length generated by each RNP for indels categorized as NHEJ-mediated. Most indels generated by Cpf1 were larger than 3 bp (FIG. 64G), which was shown to be associated with more elevated HbF in erythroid cells (FIG. 63C). Cas9 also generated deletions larger than 3 bp, however, those were primarily generated via the MMEJ repair pathway, which are expected to be less frequently observed in vivo after infusion, as this repair pathway is poorly utilized by the rare population of HSC within the CD34+ cells. NHEJ is the major repair pathway utilized by HSC (FIG. 63B), thus evaluation of the NHEJ-mediated indel profile provides information on the type of indels that are expected to be maintained in vivo at long-term after infusion of CD34+ cells.

[0524] When compared to Cas9 RNP (Sp35 RNP), the Cpf1 RNP (RNP58) showed a shift to larger NHEJ mediated indels (FIG. 64A), with the most commonly observed NHEJ indel length being 1 bp for Cas9 compared to 5 bp for Cpf1, indicating a more favorable CD34+ cells editing profile by Cpf1 for both robust and durable induction of HbF.

[0525] The percentage of >3 bp NHEJ mediated indels, >3 bp MMEJ mediated indels, and ≤3 bp indels at the distal CCAAT box resulting from editing by RNP58 (Cpf1) or Sp35 RNP (Cas9) is shown in FIG. 64B (indels generated by SpCas9 (left pie chart): NHEJ>3 bp=21.42%; ≤3 bp=48.84%; MMEJ>3 bp=29.74%; indels generated by RNP58 (right pie chart): NHEJ>3 bp=64.86%; ≤3 bp=11.11%; MMEJ>3 bp=24.02%). Cas9 (Sp35 RNP)-edited cells comprised a large fraction of small indels less than 3 bp in length, and indels>3 bp in length (associated with highest levels of HbF) were largely mediated by the MMEJ pathway (FIG. 64B). Instead, close to 90% of indels mediated by Cpf1 (RNP58) were >3 bp in length, approximately two third of those mediated by NHEJ (FIG. 64B), suggesting that the high fraction of indels >3 bp in length is expected to be maintained at long term in vivo, and the ratio of MMEJ-mediated indels is reduced in favor of NHEJ-mediated indels (FIG. 63B). Taken together, this highlights that the most durable NHEJ mediated indels are productive (>3 bp) with RNP58, whereas Sp35 RNP produces a much lower fraction of productive indels, many of which are not durable (MMEJ meditated). This demonstrates that RNP58 is an advantageous editing tool that generates HbF-inducing indels through NHEJ-mediated repair rather than solely via MMEJ repair to achieve durable HbF expression.

### Example 26: Infusion of RNP32 Edited mPB CD34+ Cells into NOD,B6.SCID Il2rγ−/− Kit (W41/W41) Mice Results in Long Term Engraftment, Indel Maintenance, and High HbF Induction

[0526] To determine whether RNP32 achieves edits in long term repopulating hematopoietic stem cells, human adult CD34+ cells from mobilized peripheral blood (mPB) were infused into nonirradiated NOD,B6.SCID Il2rγ−/− Kit(W41/W41) (Jackson lab stock name: NOD.Cg-Kit<W-41J> Tyr<+> Prkdc<scid> Il2rg<tm1Wjl>/ThomJ) (“NBSGW”) mice. Briefly, mPB CD34+ cells at 62.5×10⁶/mL were electroporated via MaxCyte electroporation with 6 μM RNP32 (Table 21) (at a molar ratio of 2:1 gRNA:RNA guided nuclease) or buffer only (“Mock”) following 48 hours pre-stimulation in X-Vivo 10 media supplemented with SCF, TPO and FLT3. After a further 24 hours, mCD34+ cells were cryopreserved. A portion of the cells was placed in in vitro culture for up to 72 h post-electroporation and gDNA collected every day for indel analysis. On the day of infusion, mPB CD34+ cells were thawed and infused into NBSGW mice at 1 million cells per mouse via intravenous tail vein injection. Sixteen weeks later, mice were euthanized and bone marrow (BM) was collected from femurs, tibias, and pelvic bones.

[0527] Genomic DNA was isolated from both the pre-infused CD34+ cells (24-72 hours post electroporation) and from the bone marrow following 16 weeks engraftment. At 24 hours post electroporation, approximately 92% indels were achieved, as measured by Illumina sequencing of the on-target PCR product using the following primers: Forward=CATGGCGTCTGGACTAGGAG (SEQ ID NO: 1266) and Reverse=AAACACATTTCACAATCCCTGAAC (SEQ ID NO:1267).

[0528] Analysis of the indel length distribution and classification of indels of length ≤3 bp, and of indels of length >3 bp either categorized as MMEJ or NHEJ mediated indels, was conducted on the preinfusion cell population after 24 h to 72 h of in vitro culture post-electroporation. Deletions were classified as “MMEJ” if stretches of 2 base pairs (bp) or more were detected at the deletion boundary and repeated in the region immediately flanking the other end of the deletion. All other deletions were classified as NHEJ.

[0529] The distribution of indel length, shown in FIGS. 65H-K, and for NHEJ-indels only in FIGS. 65D-G), was very similar across all timepoints (FIGS. 65D and 65K). Insertions were rarely detected, and the most commonly observed deletion size was −18, which notably corresponds to the size of the 18 bp MMEJ deletion HBG1/2 c.−104 to −121 and is the most frequent repair outcome after editing this site with Cpf1 (FIGS. 64C, 79, Table 32). The most commonly observed deletion size amongst NHEJ indels was 5 bp as shown in FIGS. 65D-G.

[0530] At all timepoints, indels of size larger than 3 bp, which were observed to be associated with the highest levels of HbF induction (FIG. 63C), represented close to 90% of all indels (FIG. 65A-C). About two thirds of those were mediated by NHEJ, suggesting that the high fraction of indels >3 bp length is expected to be maintained at long term in vivo, where the ratio of MMEJ-mediated indels is reduced in favor of NHEJ-mediated indels (FIG. 63B).

[0531] Following 16 weeks engraftment, ˜96% indels were measured demonstrating indel maintenance within the long term repopulating CD34+ cells (FIG. 65A).

[0532] Next, sub-populations of cells within the bone marrow were identified via FACS analysis to determine levels of multilineage engraftment. Human chimerism and lineage reconstitution (CD45+, CD15+, CD19+, glycophorin A (GlyA, CD235a+), lineage, and CD34+, and mouse CD45+ marker expression) in BM was determined by flow cytometry and analyzed. The frequency of GlyA+ cells was calculated as GlyA+ cells/total cells in BM. Human chimerism was defined as human CD45/(human CD45+mCD45). Analysis revealed a high level of human chimerism, with no difference compared to mock electroporated cells. Greater than 90% human chimerism was achieved in both the mock and RNP32 edited groups of mice (FIG. 65M). In addition, comparable reconstitution of the B-cell, neutrophil, erythroid, and CD34+ cell lineages was observed in mice infused with RNP32 or Mock electroporated cells (FIG. 65M).

[0533] Long term HbF induction by CD235a+ (GlyA+) erythroid cells, derived from RNP32 edited CD34+ cells was also analyzed. GlyA+ cells obtained from bone marrow were stained for gamma globin expression and analyzed via flow cytometry. The edited cells demonstrated pancellular distribution with ˜90% of cells being F positive (FIG. 65N). In addition, the GlyA+ cell population was isolated by Fluorescence Activated Cell Sorting (FACS), collected and lysed in HPLC grade water. Lysates were then evaluated for HbF expression by UPLC. FIG. 65O depicts the HbF expression within the GlyA+ population, which exceeded 50%, calculated as gamma/beta-like chains (%) by GlyA+ cells.

[0534] These data demonstrate that robust long-term HbF induction is achieved with RNP32 editing of human CD34+ cells. In addition, RNP32 editing does not negatively impact the engraftment and lineage reconstitution capacity of CD34+ cells.

### Example 27: Infusion of RNP32 Edited mPB CD34+ Cells into NSG (NOD-SCID Il2rγ^{Null}) Mice Demonstrates a Highly Polyclonal and Stable Engraftment of Edited Cells Over 20 Weeks with No Clonal Outgrowth

[0535] To determine whether indels derived from RNP32 (Table 21) maintain a polyclonal profile longitudinally, human adult CD34+ cells from mobilized peripheral blood (mPB) were infused into nonirradiated NSG (NOD-SCID Il2rγ^{Null}) (Jackson lab stock name: NOD.Cg-Prkdc^{scid} Il2rg^{tm1Wjl}/SzJ (“NSG”) mice. Briefly, mPB CD34+ cells at 62.5×10⁶/mL were electroporated via MaxCyte electroporation with 6 μM RNP32 or buffer only (“Mock”) following 48 hours pre-stimulation in X-Vivo 10 media supplemented with SCF, TPO and FLT3. After a further 24 hours, mCD34+ cells were cryopreserved. On the day of infusion, mPB CD34+ cells were thawed and infused into busulfan treated NSG mice at 5 million cells per mouse via intravenous tail vein injection. Blood was collected from mice via tail snips at 8, 12, 16, and 20 weeks post infusion and gDNA was isolated. Indel profile analysis was performed on these samples, along with the pre-infusion CD34+ cell product (24 hours post electroporation) to track maintenance of polyclonality. The following primers were used to detect indels: Forward=CATGGCGTCTGGACTAGGAG (SEQ ID NO: 1266) and Reverse=AAACACATTTCACAATCCCTGAAC (SEQ ID NO: 1267). No notable clonal outgrowth occurred in any of the mice analyzed demonstrating maintenance of a diverse indel profile over a 20 week period (FIG. 66A). In addition, at 20 weeks post engraftment, mice were euthanized and bone marrow (BM) was collected from femurs and tibias. Genomic DNA was isolated and indel profile analysis was performed using the primers described above. As seen in the peripheral blood, a diverse array of indels was observed (FIG. 66B). This demonstrates that hematopoiesis was reconstituted by a large number of edited hematopoietic stem cells, indicating that the RNP mediated gene modification did not impair the capacity of HSC within the edited CD34 cell population to engraft and self renew in vivo. In addition, no clonal outgrowth was observed suggesting that no cells with uncontrolled proliferation of tumorigenic potential was generated following the modification of the CD34 cells by the RNP. Emergence of a dominant clone would be a potential indication of uncontrolled proliferation or tumorigenesis, which is not seen with RNP32 editing.

### Example 28: Use of RNP for the Treatment of Sickle-Cell Disease

[0536] As described herein, an autologous cell therapy for sickle cell disease (SCD) can be developed that comprises CD34+ cells from patients with SCD that are edited with a AsCas12a RNP at the HBG1 and HBG2 promoters to induce the expression of anti-sickling fetal hemoglobin. This autologous cell therapy is a therapeutic approach to SCD to promote the expression of anti-sickling fetal hemoglobin by directly targeting the promoter of the HBG1 and HBG2 genes which encode for the fetal gamma globin chains (FIG. 67).

[0537] The efficiency of RNP32 editing for such a cell therapy was determined using CD34+ cells obtained from three independent normal adult donors and four SCD patient donors and compared. Seven batches of mobilized peripheral blood CD34+ cells were used in two independent experiments (Table).

TABLE 26
CD34+ cell batches

| | | Donor Mobilization |
|---|---|---|
| Cell Batch ID | Donor Type | Regimen |
| CEL021-014 | Normal | G-CSF and plerixafor |
| CEL042-001 | Normal | G-CSF |
| CEL238-001 | Normal | G-CSF and plerixafor |
| CEL211-001 | SCD | Plerixafor |
| CEL239-001 | SCD | Plerixafor |
| CEL240-001 | SCD | Plerixafor |
| CEL241-001 | SCD | Plerixafor |

Normal donor type cells were obtained as leukopaks from Hemacare and enriched using the CliniMACS Plus system. SCD CD34+ cells were shipped frozen on dry ice from NIH and University of California, San Francisco. All vials were stored in liquid nitrogen vapor phase until ready for experiments.

[0538] Briefly, CD34+ cells from normal or SCD donors were pre-stimulated in media consisting of X-Vivo 10, supplemented with 1× Glutamax, 100 ng/mL stem cell factor (SCF), 100 ng/mL thrombopoietin (TPO), and 100 ng/mL FMS-like tyrosine kinase 3 ligand (Flt3L) for 2 days in a humidified incubator at 37° C., 5% carbon dioxide (CO2). After 2 days of culture, cells were collected and resuspended in MaxCyte electroporation buffer. RNP32 (6 μM, at a gRNA/protein molar ratio of 2) was delivered to CD34+ cells via a MaxCyte GT electroporation device. 1×10⁶ to 6.25×10⁶ cells can be used per OC-100 cartridge for electroporation. However, due to the limited number of cells available from SCD donors, 0.4×10⁶ to 1×10⁶ cells from each batch were used for electroporation (FIG. 68B). Pre-warmed complete media was then added to the cells to give a final cell density of approximately 1×10⁶ cells/mL (assuming approximately 10% cell loss during processing). The electroporated cells, along with untreated control cells (cells that did not undergo electroporation), were then placed in a humidified incubator at 37° C., 5% CO₂. At Days 1, 2, and 3 post-electroporation, an aliquot of cells was counted to determine viability and cells were harvested for further analyses.

[0539] Comparable viabilities were obtained between normal and SCD CD34+ cells treated with RNP32 at Days 1 to 3 post-electroporation (FIG. 68A, FIG. 68B). The two samples with the lowest viability (one SCD and one normal donor CD34+ cells) coincided with low cell numbers used at electroporation (FIG. 68B).

[0540] Electroporated CD34+ cells were resuspended in Quick Extract at a concentration of 2,000 to 4,000 cells/μL. Crude genomic deoxyribonucleic acid (gDNA) extraction was conducted by subjecting the lysate to the following conditions in a thermocycler: 15 min at 65° C. followed by 10 min at 95° C. Crude gDNA was then analyzed for indels by next generation sequencing using the following primers: Forward=CATGGCGTCTGGACTAGGAG (SEQ ID NO: 1266) and Reverse=AAACACATTTCACAATCCCTGAAC (SEQ ID NO: 1267). RNP32 edited normal donor CD34+ cells as efficiently as SCD CD34+ cells (FIG. 69A, FIG. 69C). The indel levels were variable at Day 1 post electroporation (normal, 40.07% to 84.39%; SCD, 46.78% to 79.50%) but increased to approximately 90% by Day 3 post electroporation in both normal (83.13% to 97.17%) and SCD CD34+ cells (83.04% to 95.78%) (FIG. 69C, FIG. 69B (Day 3)). The variable levels of editing observed at Day 1 was likely related to the low number of cells used in this experiment, which was limited by the availability of cells from SCD donors as described above.

[0541] RNP32 recognizes both HBG1 and HBG2 promoters. Cleavage at both sites can lead to the deletion of the 4.9 kb intervening sequence. To assess the frequency of the 4.9 kb deletion, two ddPCR assays were designed, on-target amplicon and reference amplicon (FIG. 70A). The relative positions of the primers and probes are shown in FIG. 70A and the sequences are provided in FIG. 70B. For each sample, approximately 1.1 ng of gRNA was added to a droplet generator (BioRad) in a PCR plate and droplets were generated following manufacturers instruction. The plate was then moved to the thermocycler and the following protocol was run: 1 cycle of 10 min at 98° C., 40 cycles of 30 seconds at 94° C. and 2 min at 94° C., followed by 1 cycle of 10 min at 98° C. and hold at 4° C. Afterward, the plate was moved to the droplet reader (BioRad) for quantification and counting of droplets that are; a) Negative, b) Positive for both the on-target amplicon and reference amplicon, c) Positive for on-target only, d) Positive for reference only. To determine the percentage of 4.9 kb deletions, the following equation was applied to each sample.

$$\% 4.9 kb deletion = \frac{conc . reference - \frac{conc . on target}{Reference correction {factor}^{*}}}{conc . reference} \times 100$$

$${}^{*} Reference correction factor was calculated as an average of [ ( on \\ target concentration ) / ( reference concentration ) ] of the control samples .$$

[0542] The on-target editing by RNP32 also resulted in the deletion of the 4.9 kb fragment between the HBG1 and HBG2 promoters, which occurred at a frequency of approximately 27% of the beta globin loci in both normal (16.4% to 38.5%) and SCD CD34+ cells (20.7% to 32.4%) at Day 1 post-electroporation (FIG. 71A, FIG. 71B).

[0543] Erythroid progeny of normal and SCD CD34+ cells were also characterized and the ability of RNP32-edited CD34+ cells to differentiate into erythroid cells was determined. Briefly, at Day 1 post-electroporation (described above), 120,000 cells were cultured in erythroid-inducing media to generate erythroid cells using a modified three-step differentiation protocol developed by Giarratana and colleagues (Giarratana, 2005). CD34+ cells were cultured for 7 days in Step-1 media consisting of Iscove's modified Dulbecco's medium (IMDM) supplemented with 1× GlutaMAX (Gibco), 100 U/mL penicillin, 100 mg/mL streptomycin, 5% human AB+ plasma, 330 μg/mL human holo transferrin, 20 mg/mL human insulin, 2 U/mL heparin, 1 μM hydrocortisone, 3 U/mL recombinant human erythropoietin (EPO), 100 ng/mL SCF, and 5 ng/mL interleukin (IL)-3. On Day 7, cells were transferred to Step-2 media, which was identical to Step-1 media except the absence of hydrocortisone and IL-3 and cultured for 4 days. Next, cells were cultured for 7 days in Step-3 media, which was similar to Step-2 media but without the addition of SCF, and 5% human AB+ plasma was replaced with 5% KnockOut Serum Replacement (Gibco). At the end of the 18-day culture, 10 μL of cells were stained with 90 μL of erythroid fluorescence activated cell sorting (FACS) master mix for 15 min at 4° C. and acquired on a Guava easyCyte 12HT flow cytometer to determine enucleation frequency. Up to 120 mL cell suspension per sample was spun down at 500×g for 5 min to reduce the total volume of each sample down to 20 mL. Cell suspension was then passed through Acrodisc WBC syringe filters to remove nucleated cells and the resultant RBCs were used for further analyses in the experiments set forth in this example.

[0544] When placed under erythroid-inducing conditions, normal and SCD CD34+ cells (RNP32-edited cells and unedited cells), underwent robust expansion, averaging 23,000 fold across all experimental groups in 18 days (FIG. 72A, Table 27). By Day 18, the culture consisted of erythroblasts, RBCs, and extruded nuclei (pyrenocytes) (data not shown). Approximately 80% of the erythroid cells across all groups reached terminal maturation and lost their nucleus (FIG. 72B). In summary, comparable fold expansion and terminal maturation were achieved by normal and SCD CD34+ cells with or without RNP32 electroporation.

TABLE 27
Phenotype characterization of erythroid progeny of CD34+ cells

| | | | | | | | HbF+ |
|---|---|---|---|---|---|---|---|
| Experiment | | Donor | | Fold | Enucleation | HbF | cells |
| ID | Donor Lot | Type | Treatment | Expansion | (%) | (%) | (%) |
| SCD011 | CEL211-001 | SCD | untreated | 12465 | 77.42 | 16.54 | |
| | | | RNP32 | 15118 | 75.61 | 48.63 | |
| | CEL238-001 | Normal | untreated | 25814 | 83.62 | 17.97 | |
| | | | RNP32 | 16674 | 81.77 | 39.24 | |
| SCD014 | CEL240-001 | SCD | untreated | 11686 | 80.57 | 25.84 | 71.27 |
| | | | RNP32 | 12856 | 78.30 | 58.99 | 94.50 |
| | CEL241-001 | SCD | untreated | 16793 | 83.21 | 17.26 | 58.65 |
| | | | RNP32 | 16937 | 84.72 | 53.70 | 93.45 |
| | CEL239-001 | SCD | untreated | 19732 | 76.43 | 18.25 | 50.09 |
| | | | RNP32 | 20540 | 76.79 | 51.03 | 93.29 |
| | CEL211-001 | SCD | untreated | 27390 | 80.06 | 27.92 | 64.51 |
| | | | RNP32 | 35845 | 81.21 | 58.71 | 93.79 |
| | CEL238-001 | normal | untreated | 16214 | 78.15 | 16.36 | 58.23 |
| | | | RNP32 | 29239 | 81.70 | 51.60 | 92.92 |
| | CEL021-014 | normal | untreated | 21498 | 87.12 | 11.08 | 37.76 |
| | | | RNP32 | 27659 | 86.71 | 38.38 | 90.61 |
| | CEL042-001 | normal | untreated | 26615 | 69.14 | 10.49 | 45.00 |
| | | | RNP32 | 53774 | 80.08 | 43.83 | 93.85 |

The enucleation rate was calculated as proportion of NucRed-cells (RBC) within CD235+ (erythroid) population.

[0545] HbF induction in the erythroid progeny of normal and SCD CD34+ cells post-editing by RNP32 was also characterized and a globin chain analysis was performed. Expression of various hemoglobin subunits was analyzed using reverse phase ultra-performance liquid chromatography (RP-UPLC) modified from a method described by Masala and Manca 1994). 1×10⁶ cells post filtration from erythroid differentiation described above were washed once with phosphate buffered saline (PBS)-0.5% bovine serum albumin (BSA), and then lysed in 50 μL liquid chromatography-mass spectrometry (LC-MS) grade water. Samples were loaded onto the Agilent 1290 UPLC system. Elution was followed at 220 nm with no reference wavelength. The globin chains were eluted in the following order: β, α, AγT (a common Aγ variant, gene product of HBG1), Gγ (gene product of HBG2), and Aγ (gene product of HBG1). Area under the curve under each peak approximated the relative abundance of each globin chain and was used to calculate the level of HbF. As HbA is composed of α2β2 and HbF is composed of α2γ2, the level of HbF expression was calculated as (Aγ+Gγ)/(Aγ+Gγ+β) (%), or (AγT+Aγ+Gγ)/(AγT+Aγ+Gγ+β) (%), labelled as γ/β-like (%).

[0546] The frequency of HbF+ cells (HbF-expressing cells) in RBCs following filtration was determined using a method described by Thorpe (Thorpe 1994). In brief, the RBCs from the erythroid differentiation described above were fixed with 4% formaldehyde, permeabilized with ice-cold acetone, washed with PBS-0.5% BSA, and stained with HbF+ cell FACS master mix. Cells were washed with PBS-0.5% BSA, resuspended in PBS 0.5% with NucRed (2 drops/mL) and acquired on the Guava flow cytometer.

[0547] Erythroid cells derived from normal and SCD CD34+ cells electroporated with RNP32 demonstrated elevated, and pancellular HbF expression. An average of 43.26% HbF was measured in the treated normal donor group (38.38% to 51.60%), and 54.21% HbF in the treated SCD donor group (48.63% to 58.99%), significantly increased from a background of 13.98% (10.49% to 17.97%) and 21.16% (16.54% to 27.92%) in the untreated normal donor group and SCD donor group, respectively (FIG. 73A, Table 27). In addition, on average >92% of RBCs derived from RNP32-electroporated CD34+ cells of either donor type (normal or SCD donors) were HbF+ (normal, 90.61% to 93.85%; SCD, 93.29% to 94.50%) (FIG. 73B, Table 27), which was significantly elevated compared to RBCs derived from respective untreated CD34+ cells (normal, 37.76% to 58.23%; SCD, 50.09% to 71.27%). Thus, high RNP32 editing levels resulted in elevated HbF levels after in vitro erythroid differentiation, with over 50% of HbF measured in RNP32-derived red blood cells (FIG. 73C).

[0548] Several assays were conducted to demonstrate the clinical relevance of the elevated fetal hemoglobin in untreated sickle cell patient cells, and to a lesser extent the untreated cells from normal donors, as shown in FIG. 73B. Due to the in vitro culture used to differentiate the CD34+ cells into RBCs to conduct those assays, there is a high background of HbF in untreated cells derived from SCD patients. This is expected with these culture conditions, and has been previously reported by Métais et al. (Métais 2019). This likely partially masks the full extent of the benefit achieved in modified cells when compared to unmodified cells.

[0549] To evaluate the impact of HbF induction on the sickling of RBCs as a result of hypoxia-induced HbS polymerization, untreated RBCs derived from unedited SCD CD34+ cells (unedited control cells) and RBCs derived from edited SCD CD34+ cells were incubated with oxygen scavenger sodium metabisulfite solution to remove oxygen from the cell suspension, thereby placing the cells under extremely reduced oxygen tension. The percentage of sickled RBCs derived from unedited SCD CD34+ cells and sickled RBCs derived from RNP-32 edited SCD CD34+ cells was then determined and compared.

[0550] Briefly, cells were first induced to generate erythroid cells. One million RNP32-edited RBCs were collected from the erythroid differentiation assay as described above and washed with PBS-0.5% BSA. The cell pellet was then resuspended in 20 μL PBS and mixed with 20 μL of 2% sodium metabisulfite weight/volume in water. One drop (approximately 20 μL) of this cell mix was then placed on a microscopic slide, covered with a coverslip and the edges were sealed. Slides were stored at room temperature for 1 to 4 hours before imaging and analyzing for morphological changes. Average sickling frequency reduced from 38.3% in untreated SCD RBCs (having a mean HbF of 19.9%) to 10.6% in RNP32-edited SCD RBCs (having a mean HbF of 53.8%), representing an approximate 4-fold decrease in sickling morphology for RNP32-edited RBCs from SCD patients compared with unedited RBCs from SCD patients (FIG. 74). Sodium meta-bisulfite leads to extreme hypoxia, below levels commonly observed physiologically, thus even lower percentage of sickling RBC is expected in vivo from the edited cells.

[0551] The deformability of SCD RBCs was also evaluated. To evaluate whether HbF induction decreases the rigidity and improves the deformability of SCD RBCs when deoxygenated, untreated RBCs from patients with SCD and RNP32-edited RBCs from SCD patients were analyzed on a Lorrca ektacytometer where shear stress was applied under decreasing oxygen tension (FIG. 75A). Fifteen million RBCs following filtration from erythroid differentiation (as described above) were collected and washed with PBS-0.5% BSA. Cells were centrifuged at 500×g for 5 minutes, resuspended in 1.5 ml of OXY ISO solution (Lorrca), and mixed gently by inversion. Cell suspension was then loaded onto the Lorrca ektacytometer where Oxygenscan was performed per manufacturer's instructions to measure the deformability of RBCs under shear stress when deoxygenated. RBC deformability was expressed as elongation index (EI) (FIG. 75A) and “point of sickling” represented the relative oxygen pressure when the SCD RBCs started to sickle and lost >5% of the EI during deoxygenation. Normal RBCs containing healthy adult hemoglobin (HbA and HbF) from three different donors were not impacted by the reduction in oxygen tension (FIG. 75B). In contrast, SCD RBCs from four donors became rigid when deoxygenated, as illustrated by the gradual decrease in elongation index corresponding with oxygen depletion (FIG. 75C (black line)). SCD RBCs derived from RNP32-edited CD34+ cells started to sickle at lower oxygen tension (represented as the point of sickling) compared to RBCs from untreated CD34+ cells (FIG. 75C (grey line), 75D, Table 28). In addition, deoxygenated RNP32-treated SCD RBCs remained more flexible than untreated SCD RBCs as demonstrated by the higher minimum elongation index observed for RNP32-treated SCD RBCs relative to untreated SCD RBCs (FIG. 75E, Table 28).

TABLE 28
Summary of deformability assessment of RBCs

| Experiment | | Donor | | Point of Sickling | Minimum |
|---|---|---|---|---|---|
| ID | Donor Lot | Type | Treatment | (pO2, mmHg) | Elongation Index |
| SCD011 | CEL211-001 | SCD | untreated | 60.17 | 0.085 |
| | | | RNP32 | 35.11 | 0.260 |
| SCD014 | CEL240-001 | SCD | untreated | 38.55 | 0.187 |
| | | | RNP32 | 21.80 | 0.340 |
| | CEL241-001 | SCD | untreated | 31.18 | 0.292 |
| | | | RNP32 | 11.80 | 0.399 |
| | CEL239-001 | SCD | untreated | 53.60 | 0.104 |
| | | | RNP32 | 50.09 | 0.238 |
| | CEL211-001 | SCD | untreated | 41.62 | 0.156 |
| | | | RNP32 | 21.27 | 0.330 |

[0552] Next, to assess whether the reduced sickling and increased flexibility of SCD RBCs derived from RNP32-edited CD34+ cells would lead to improved rheological behavior, RBCs were evaluated using a microfluidic platform. The microfluidic platform replicated blood flow in the microvasculature for direct observation of the bulk flow of cultured SCD RBCs under varying oxygen conditions. When deoxygenated, the intracellular polymerization of HbS makes RBCs inflexible and rigid which translates to a drop in the velocity through the microchannel. Briefly, one hundred and fifty million RBCs following filtration after erythroid induction as described above were spun down and resuspended in fresh Step-3 media to a final concentration of 10×10⁶ cells/mL. Cultured RBCs were washed with PBS, and resuspended in PBS to achieve a 20% target hematocrit. A 15 μL volume of cultured RBCs was loaded onto the device under constant pressure and subjected to varying levels of oxygen controlled via a gas mixing system. The flow was captured by a high-speed camera and the blood velocity through the channel was determined using the Kanade-Lucus-Tomasi feature tracking in MATLAB. The velocity of the cells was then measured under a range of oxygen levels. Typical oxygen levels observed in the venous circulation are approximately 4% to 6% oxygen.

[0553] RBCs from normal donors showed no oxygen-dependent rheology impairment (FIG. 76A, FIG. 76B). While the rheological behavior of RBCs derived from RNP32-edited SCD CD34+ cells did not completely normalize, they exhibited lower magnitudes of impairment during hypoxia and required more extreme hypoxia before the onset of a decrease in velocity compared with RBCs derived from untreated SCD CD34+ cells (10% oxygen for RBCs derived from untreated SCD CD34+ cells and 6% oxygen for RBCs derived from RNP32-edited SCD CD34+ cells). As shown in FIG. 76C, RBCs derived from RNP32-edited SCD CD34+ cells (circles) demonstrated a drastically improved rheological behavior compared to RBCs derived from untreated SCD CD34+ cells (triangles) at physiological oxygen levels. Unedited RBCs from normal donors (diamonds) showed no oxygen-dependent rheology impairment. While the rheological behavior of RBCs derived from RNP32-edited SCD CD34+ cells did not completely normalize, they exhibited lower magnitudes of impairment during hypoxia and required more extreme hypoxia for the onset of decrease in velocity compared with RBCs derived from unedited SCD patient CD34+ cells. Notably, at oxygen levels typically observed in the venous circulation, the velocity of red blood cells derived from RNP32-edited CD34 cells was almost fully normalized compared to RBC derived normal donor cells. The reduction in rheology impairment under hypoxia was also strongly correlated with increased levels of HbF in the RBCs (FIG. 76D, FIG. 76E). For example FIG. 76E shows that RBCs that had the highest HbF levels exhibited the highest velocity at a physiological oxygen level of 4%. This indicates that the phenotypic correction of RBCs from sickle cell patients is greatest with very high levels of HbF expression, as observed with RBCs derived from RNP32-edited SCD CD34+ cells (FIG. 76D, FIG. 76E).

[0554] In sum, two studies were conducted to interrogate editing of SCD and normal CD34+ cells with RNP32 and determine the functional outcome in the erythroid progeny. RNP32 efficiently edited normal and SCD CD34+ cells, achieving approximately 90% insertions and/or deletions (indels) at Day 3 post-electroporation. Editing of CD34+ cells with RNP32 did not negatively impact the erythroid differentiation or maturation. Robust HbF expression was obtained, averaging 43.26% and 54.21% of total hemoglobin in RBCs derived from RNP32-edited normal and SCD CD34+ cells respectively, distributed in a pancellular fashion (averaging >92% RBCs). The high level of HbF expression in RBCs derived from RNP32-edited SCD CD34+ cells coincided with decreased sickling, improved deformability under shear stress, and improved flow through microfluidic channels when deoxygenated compared to RBCs derived from untreated SCD CD34+ cells. Potentially therapeutically relevant levels of HbF were achieved through highly efficient RNP32 editing of CD34+ cells at the HBG1 and HBG2 promoter region. This translates to a reduction in sickling and improved rheological properties in red blood cells, which is advantageous for an autologous cell therapy using RNP32 for the treatment of sickle-cell disease.

### Example 29: Meta-Analysis of On-Target Indels Generated by RNP32 in CD34+ Cells

[0555] Following CRISPR/Cas editing, DNA repair mechanisms like non-homologous end joining (NHEJ) and microhomology-mediated end joining (MMEJ) result in highly heterogeneous repair outcomes comprising hundreds of different genotypes. The editing outcomes produced when using Cpf1 (also referred to as AsCas12a), the enzyme used for RNP32, have not been characterized in detail. Cpf1 editing results in a four nucleotide 5′ overhang (see FIG. 77A), which is quite different from the blunt ends of SpCas9 edits (see FIG. 63A). As used in this example, “cut site” is used to refer to the position at the middle of the expected overhang resulting from editing with RNP32 (FIG. 77A, grey dashed line).

[0556] DNA repair mechanisms often create indels ranging in size from 1 to approximately 50 base pairs (bp), which are typically detected by PCR-based targeted sequencing assays. More complex genomic repair outcomes have also been described (Giannoukos 2018; Kosicki 2018; Bothmer 2020), and include deletions at the on-target locus larger than ˜50 bp, called resections, and translocations. These more complex rearrangements require other methods for a precise quantification (see, e.g., PCT/US2018/012652).

[0557] To determine the indel profile generated by RNP32, indels ranging in size from 1 bp to approximately 50 bp at the distal CCAAT-box generated by RNP32 were characterized using PCR-based targeted sequencing assays. The indel patterns were studied in a variety of samples, spanning different genotypes (normal vs sickle cell disease) and mobilization regimens (plerixafor alone vs G-CSF alone vs G-CSF+plerixafor) (Table 29). This meta-analysis demonstrates that RNP editing at the CCAAT box results in a distinct indel profile that is reproducible across a variety of samples and levels of editing.

TABLE 29
Samples used in meta-analysis

| Exp. #/ | Donor | | Donor Mobilization | RNP32 |
|---|---|---|---|---|
| Batch # | Type | CEL ID (Donor) | Regimen | [μM] |
| SCD011 | Normal | CEL238-001 | G-CSF & plerixafor | 6 |
| SCD011 | SCD | CEL211-001 | plerixafor | 6 |
| SCD014 | Normal | CEL021-014 | G-CSF & plerixafor | 6 |
| SCD014 | Normal | CEL042-001 | G-CSF | 6 |
| SCD014 | Normal | CEL238-001 | G-CSF & plerixafor | 6 |
| SCD014 | SCD | CEL211-001 | plerixafor | 6 |
| SCD014 | SCD | CEL239-001 | plerixafor | 6 |
| SCD014 | SCD | CEL240-001 | plerixafor | 6 |
| SCD014 | SCD | CEL241-001 | plerixafor | 6 |
| SCD1 | Normal | CEL172-008 | G-CSF & plerixafor | 8 |
| SCD1 | Normal | CEL182-008 | G-CSF & plerixafor | 8 |
| SCD1 | Normal | CEL171-008 | G-CSF & plerixafor | 8 |
| SCD1 | Normal | CEL192-008 | G-CSF & plerixafor | 8 |
| SCD1 | Normal | CEL168-008 | G-CSF & plerixafor | 8 |

Samples were obtained from research-scale (SCD011, SCD014) or large-scale (SCD1) processes. No significant differences were observed in RNP32-edited cells produced using research-scale versus large-scale processes (data not shown). The donors from experiments SCD011 and SCD014 are the same as those in Example 28 (Table 27).

[0558] Mobilized peripheral blood CD34+ cells from 12 distinct donors (normal donors and SCD donors) were used in this meta-analysis (Table 29). Five samples from normal donors were generated using a large-scale process (Table 29, Experiment SCD1). Briefly, leukopaks (HemaCare or KeyBiologics) were obtained from normal donors mobilized with granulocyte colony stimulating factor (G-CSF) and plerixafor. CD34+ cells were enriched using the CliniMACS Plus system, aliquoted, cryopreserved in Cryostor CS10, and stored in liquid nitrogen vapor phase. CD34+ cells were thawed, cultured for 2 days in complete media consisting of X-Vivo 10, supplemented with 1× Glutamax, 100 ng/mL stem cell factor (SCF), 100 ng/mL thrombopoietin (TPO), and 100 ng/mL FMS-like tyrosine kinase 3 ligand (Flt3L), mixed with RNP32 (at a gRNA/protein molar ratio of 2) to a final concentration of 8 μM, and electroporated with a Maxcyte GT electroporation device per manufacturer's instruction. The cellular materials were cultured overnight following electroporation, aliquoted, and cryopreserved in Cryostor CS10, and stored in liquid nitrogen vapor phase until ready for experimentation.

[0559] Nine samples were generated using a research-scale process (Table 29, SCD011 and SCD014). Cells were thawed, washed, and cultured at 1×10⁶ cells/mL in complete media consisting of X-Vivo 10, supplemented with 1× Glutamax, 100 ng/mL stem cell factor (SCF), 100 ng/mL thrombopoietin (TPO), and 100 ng/mL FMS-like tyrosine kinase 3 ligand (Flt3L) for 2 days in a humidified incubator at 37° C., 5% carbon dioxide (CO2). After 2 days of culture, cells were collected and resuspended in Maxcyte electroporation buffer. RNP32 (at a gRNA/protein molar ratio of 2) was added to the cell suspension to a final concentration of 6 μM. The mixture was transferred to a Maxcyte OC-100 cartridge and electroporated with a Maxcyte GT electroporation device per manufacturer's instruction. After electroporation, cells were cultured in complete media for 1 day prior to harvesting for analysis.

[0560] The fraction of small indels present in the samples was assessed by Illumina amplicon sequencing (ILL-seq), following library preparation method and analysis. A 15 bp window around the expected cut site was used in the analysis to calculate editing rates. The oligonucleotides and amplicon used to generate the targeted amplicon sequencing products are provided in FIG. 77A and FIG. 77B.

[0561] To characterize editing by RNP32, the indels generated in each sample were analyzed and processed. The results were summarized by looking at 1) percentage deletion for each base within the target region, 2) distribution of insertion and deletion center positions, and 3) distribution of insertion and deletion lengths. To perform these analyses, the cigar strings for the reads in the alignment bam files were processed, using the following steps:
[0562] 5) Group indels appearing in the same read.
[0563] 6) Create indel_id for indels from each read. Indel_id is a string identifying the indel, shown as indel_start_position+_+indel_length+_+ID. Where ID is NA for deletions and for insertions is the sequence inserted. See example in FIG. 77D.
[0564] 7) Group reads with the same indel_id.
[0565] 8) Count number of reads with the same indels and calculate their total fractions (including wt) and fractions in indels (excluding wt). Fractions in indels allow for a comparison between samples when they have different amounts of total editing.

[0566] To analyze the reproducibility of the individual indels detected across samples, the number of times they were detected across samples and their average percentage in indels was estimated. When an indel was not detected in a particular sample it was assumed to have a percentage of 0%.

[0567] The total percentage of indels for each RNP32-edited sample in this analysis are shown in Table 30. All the samples (including normal and SCD donors) exhibited overall editing greater than 72.6% (ranging from 72.6% to 89.2%), except for three samples that exhibited lower editing between about 40% to 53%. The samples exhibiting lower editing had low viability potentially associated with lower numbers of cells used for electroporation.

TABLE 30
Editing results for all the samples

| Donor Type | CEL ID | EXP # | Total Indels % |
|---|---|---|---|
| Normal | CEL238-001 | SCD011 | 84.39% |
| SCD | CEL211-001 | SCD011 | 79.50% |
| Normal | CEL021-014 | SCD014 | 40.07% |
| Normal | CEL042-001 | SCD014 | 78.37% |
| Normal | CEL238-001 | SCD014 | 80.70% |
| SCD | CEL211-001 | SCD014 | 46.78% |
| SCD | CEL239-001 | SCD014 | 52.92% |
| SCD | CEL240-001 | SCD014 | 75.38% |
| SCD | CEL241-001 | SCD014 | 72.63% |
| Normal | CEL172-008 | SCD1 | 88.91% |
| Normal | CEL182-008 | SCD1 | 87.11% |
| Normal | CEL171-008 | SCD1 | 84.04% |
| Normal | CEL192-008 | SCD1 | 89.24% |
| Normal | CEL168-008 | SCD1 | 88.76% |

[0568] In total, 385 unique indels were detected, counting only those indels that were found at a percentage above 0.1% (out of total indels) in at least one of the samples in Table 32.

[0569] The wt allele and the top 20 indels are shown in FIG. 79, alongside their relative average frequency (amongst all samples). The most abundant indel, 159_−18_NA, was present on average 15.15% among all the samples. Notably, indel 157_−13_NA, more commonly known as the 13 bp HPFH deletion, was detected on average at 2.63%. The 13 bp deletion is a naturally occurring mutation associated with elevated HbF.

[0570] Indel analysis of the bulk CD34+ population (progenitors) 24-72 hours after electroporation can determine whether edits at this site were derived from Cas12a or Cas9. In the case of Cas12a, the most dominant indel detected at this timepoint is the 159_−18 deletion, however with Cas9 the most frequent indel is the 157_−13 deletion. In addition, the most common NHEJ indel generated by Cas9 at this site is a −1 bp deletion (169_−1_NA, Table 31), which occurred here at ˜9.6%. In contrast, following editing with Cas12a, the most common NHEJ indels generated are 6 bp and 4 bp deletions (165_−6_NA, and 167_−4_NA; Table 31, RNP58; Table 32, RNP32). Cpf1 generally produces larger NHEJ deletions, when compared to Cas9 at this site.

[0571] Indel analysis of the bulk CD34+ population (progenitors) 24-72 hours after electroporation can determine whether edits (indels) at this site were derived from Cpf1 or Cas9. For example, in the case of Cpf1, the most dominant indel detected at this timepoint is the 159_−18 deletion at an average percentage of 15.15% of the total indels (Table 32) compared to an average percentage of 1.35% for SpCas9, see Table 31. However, the most frequent indel for SpCas9 is the 157_−13 deletion at an average percentage of 31.88% of the total indels (Table 31) versus an average percentage of 2.63% of the total indels for Cpf1 (Table 32).

[0572] Results for the distributions of indel center points and indel lengths are shown in FIGS. 80 and 81, respectively. The most common indel center position (peak) was located 6 bp away from the cut site, at position TSS:−113. Peaks in the deletion length distribution were observed at 13 bp and 18 bp, corresponding mostly to the 157_−13_NA and 159_−18_NA MMEJ indels. Due to the resection and utilization of microhomology sequences during MMEJ repair, this pathway tends to generate larger size deletions than those mediated via the NHEJ pathway. Besides those, the most commonly observed deletion length was 5 bp with 9.30% (FIG. 82). Insertions were rarely detected (total contribution of 0.50%). Deletions between 1 bp and 25 bp had a total contribution of 92.03% among all indels (deletions between 3 bp and 25 bp had a total contribution of 85.85% among all indels, deletions between 4 bp and 25 bp had a total contribution of 80.35% among all indels, and deletions between 5 bp and 25 bp had a total contribution of 72.04% among all indels) (Table 32). Overall, both the distribution of indel center points and indel lengths were very similar across the Normal and SCD samples. As shown in FIG. 63C above, the generation of indels 4 bp and longer results in the highest induction of HbF.

[0573] The results for the percentage of bases deleted along the target region (deletion profile) are shown in FIG. 83 and FIG. 84 (normalized to the same maximum value of 1 for comparison between samples). The shapes of the profiles are very similar across all samples, despite having different total editing values (Table 30). No major differences were observed between Normal donor (Normal) and sickle cell disease donor (SCD) samples or different mobilization regimens. The deletion profiles show that the peak of the distribution (most commonly deleted base) is 6 bp toward the TSS from the cut site, at TSS: −113.

[0574] Of the total of 385 indels detected at 0.1% in any of the samples evaluated, 108 indels were detected in all 14 samples (FIG. 85 and Table 32). All indels present at an average percentage in indel greater than 0.22% were detected in all 14 samples (a total of 55 indels, above the grey line FIG. 86 and also in Table 32), and had a total indel contribution of 69.90%. Overall, the reproducibility of indel detection was very high.

[0575] To look in more detail at the consistency in each individual indel frequency between the indels detected across all samples, their pairwise correlation plots and R² were calculated. To avoid under sampling bias, when comparing two samples, only indels which had a minimum percentage of 0.1% (of all indels) in at least one of the two samples was considered. Excluding the three samples with editing below 60% due to the low number of cells used for electroporation (see Table 29), all R² values were greater than 0.8 (data not shown). Overall, the correlation between indel percentages among the samples with high editing was very high.

[0576] In sum, a total of 385 unique indels were detected at a percentage above 0.1% in at least one of the 14 edited samples tested in this Example. The most abundant indel, 159_−18_NA, was present between all the indels on average 15.15% among all the samples. Indel 157_−13_NA, more commonly known as the 13 bp HPFH deletion, was detected on average at 2.63%. The shapes of the indel profiles for all edited samples were very similar across all studies, despite having different total editing values. No major differences were observed between Normal donor and SCD donor samples or different mobilization regimens.

[0577] Evaluation of individual indel positions showed that indels generated by RNP32 were mostly centered around position TSS: −113, which was also the most commonly deleted base observed. Evaluation of the distribution of indel lengths showed peaks at −18 and −13 corresponding primarily to the MMEJ indels, 159_−18_NA (most abundant indel, starting at TSS: −104 and of length 18 bases) and 157_−13_NA (starting at TSS: −102, 13 bp HPFH deletion). Besides these, the most commonly observed deletion length was 5 bp at 9.30%. Insertions were rarely detected (total contribution of 0.50%). Deletions between 1 bp and 25 bp had a total contribution of 92.03% among all indels. Overall, the distribution of indel length and center position were very similar between the Normal and SCD samples. Of the total of 385 unique indels, 108 indels were detected in all 14 samples. All indels present at an average percentage in indel greater than 0.22% were detected in all 14 samples (a total of 55 indels), and had a total indel contribution of 69.90%. Pairwise correlations among the detected indels (excluding the three samples with editing below 60%) had R² values greater than 0.8.

[0578] This data demonstrate that RNP32 editing at the HBG1/2 distal CCAAT box results in a unique indel signature that is reproducible across a variety of samples and levels of editing.

### Example 30: Analysis of Normal Donor CD34+ Cell RNP32 Editing Efficiency Including 4.9 kb Fragment Deletion

[0579] The on-target editing efficiency of RNP32 in mobilized peripheral blood CD34+ cells obtained from four independent normal adult donors was assessed, as well as the frequency of deletion of the 4.9 kb fragment between the two RNP32 cut sites. In addition, the on-target indel levels and frequency of the 4.9 kb deletion were also measured in several subpopulations of HSPC sorted from total CD34+ cells to address whether phenotypic long-term hematopoietic stem cells (LT-HSC) could be edited efficiently with RNP32.

[0580] Leukopaks from four normal donors treated with granulocyte colony-stimulating factor (G-CSF) plus Mozobil or with G-CSF alone were obtained from HemaCare. CD34+ cells (Lot: CEL045-002, CEL046-004, CEL047-002, and CEL021-021) were enriched using the CliniMACS system (Miltenyi), aliquoted, and cryopreserved in Cryostor CS10. Cells were thawed, washed, and cultured at 1×10⁶ cells/mL in complete media consisting of X-Vivo 10, supplemented with 1× Glutamax, 100 ng/mL stem cell factor (SCF), 100 ng/mL thrombopoietin (TPO), and 100 ng/mL FMS-like tyrosine kinase 3 ligand (Flt3L) for 2 days in a humidified incubator at 37° C., 5% carbon dioxide (CO2). After 2 days of cultures, cells were collected and resuspended in Maxcyte electroporation buffer. RNP32 (gRNA/protein molar ratio of 2) was added to the cell suspension to a final concentration of 6 μM. The mixture was transferred to a Maxcyte OC-100 cartridge and electroporated with a Maxcyte GT electroporation device per manufacturer's instruction.

[0581] RNP32 recognizes both HBG1 and HBG2 promoters. Cleavage at both sites can lead to the deletion of the 4.9 kb intervening sequence. To assess the frequency of the 4.9 kb fragment deletion, the two ddPCR assays, reference amplicon and on-target amplicon, were performed as described in Example 28 (see FIGS. 70A-70D). Briefly, cells at 1 or 2 days post-electroporation with RNP32, and sorted cells were resuspended in Quick Extract at a concentration of 2,000 to 4,000 cells/μL. Crude genomic deoxyribonucleic acid (gDNA) extraction was conducted by subjecting the lysate to the following conditions in a thermocycler: 15 min at 65° C. followed by 10 min at 95° C. Crude gDNA was then analyzed for indels (insertions and deletions) by next generation sequencing (using the primers set forth in FIG. 77A) and 4.9 kb fragment deletion assessment by digital droplet polymerase chain reaction (ddPCR).

[0582] RNP32 edited the HBG1 and HBG2 promoters of normal donor CD34+ cells in an RNP concentration-, and time-dependent manner without significantly impacting the cell viability (FIG. 87A, 87B, FIG. 88, and FIG. 89). At 8 μM, the highest concentration of RNP32 tested, an average of 86% on-target indel level was achieved in normal donor CD34+ cells by Day 1 and rose to 91% by Day 2 post-electroporation (FIG. 90). The increase was more evident at lower RNP concentration with average indel level at 1 μM rising from 62% to 77% by Day 1 and Day 2 post-electroporation. By Day 2 post-electroporation, >85% on-target indel level was routinely achieved when CD34+ cells were transfected with >3 μM RNP32.

[0583] Editing of CD34+ cells with RNP32 resulted in frequent deletion of the 4.9 kb intervening fragment between the two RNP32 cut sites at the HBG1 and HBG2 gene promoters, respectively. On average, approximately 35% of the beta globin loci in the CD34+ cells had the 4.9 kb fragment deleted both at Day 1 and Day 2 post electroporation with >2 μM of RNP32 (FIG. 91A, FIG. 91B and FIG. 92). The 4.9 kb fragment deletion to indel ratio in CD34+ cells was approximately 0.47 at Day 1 and decreased to approximately 0.40 at Day 2 post-electroporation with >2 μM of RNP32.

[0584] CD34+ cells are heterogeneous and comprise lineage-restricted progenitors, MPPs, as well as self-renewing LT-HSCs. As LT-HSCs will be responsible for providing long-term reconstitution of a patient's hematopoietic system, high levels of editing in this population are pertinent for the durability of the treatment. To address whether different subpopulations of CD34+ cells were edited similarly, the on-target indel levels in CMPs, MPPs, and phenotypic LT-HSCs, defined by surface immunophenotype, was evaluated and compared to the on-target indel levels in total CD34+ cells across multiple RNP concentrations.

[0585] Briefly, CD34+ cells were sorted two days post electroporation with RNP32 to obtain three subpopulations of HSPCs including phenotypic LT-HSC, multipotent progenitor (MPP) cells, and common myeloid progenitor (CMP) cells using a BD fluorescence-activated cell sorting (FACS)Aria Fusion cell sorter (BD Biosciences). Gating was set to collect the following enriched CD34+ cell subpopulations: phenotypic LT-HSC (P7, CD34 bright, CD38 low/negative, CD90+, CD45RA−), MPP (P6, CD34 bright, CD38 low/negative, CD90−, CD45RA−), and CMP (P9, CD34 bright, CD38 high, CD123+, CD45RA−).

[0586] Of the three subpopulations, CMPs consistently had the highest on-target indel levels and phenotypic LT-HSCs had the lowest on-target indel levels (analyzed via NGS using the primers set forth in FIG. 77B) across all RNP concentrations evaluated (FIG. 93A, FIG. 93B and FIG. 94) (Study MAX072). Nevertheless, at ≥3 μM RNP32, on-target indel levels of >85% were achieved in phenotypic LT-HSCs, similar to the on-target indel levels detected in total CD34+ cells, suggesting that self-renewing LT-HSCs can be efficiently edited using RNP32 (FIG. 93A, FIG. 93B and FIG. 94).

[0587] RNP32 editing resulted in deletion of the 4.9 kb fragment in all three subpopulations of hematopoietic stem and progenitor cells tested (FIG. 95A and FIG. 96). Of the three subpopulations, CMPs consistently had the highest levels of deletion of the 4.9 kb fragment and phenotypic LT-HSCs had the lowest levels of deletion of the 4.9 kb fragment across all RNP concentrations evaluated. The 4.9 kb fragment to indel ratio averaged across all RNP concentrations was approximately 0.43, 0.49, 0.33, and 0.25 in total CD34+ cells, CMP, MPP, and phenotypic LT-HSC respectively (FIG. 95B), demonstrating that the LT-HSCs had less frequent deletion of the 4.9 kb fragment as a result of RNP32 editing than their short term counterparts. Retention of the 4.9 kb inter-edit region is beneficial because a higher deletion of the 4.9 kb fragment results in a lower production of HbF. Therefore, lower levels of deletion of the 4.9 kb fragment in LT-HSCs edited by RNP32 is advantageous. The results herein demonstrate that editing with RNP32 can generate cells with clinically relevant levels of healthy HbF.

[0588] In sum, on-target indel levels and the associated 4.9 kb fragment deletion between the HBG1 and HBG2 promotors were assessed following electroporation of normal human donor CD34+ cells with RNP32. RNP32 was highly efficient at editing CD34+ cells, with consistent editing achieved across multiple RNP batches and cell donor lots. Greater than 85% on target indels in CD34+ cells were routinely achieved when electroporated with >3 μM RNP32. Comparable levels of indels between total CD34+ cells and sorted phenotypic LT HSC were also observed when electroporated with >3 μM RNP32. Loss of the 4.9 kb fragment between two RNP32 cut sites occurred at a frequency that was cell subpopulation dependent. Total CD34+ cells lost the 4.9 kb fragment at a frequency of approximately 0.4 per indel. This frequency dropped to approximately 0.25 per indel in the phenotypic LT-HSC subset of CD34+ cells.

### Example 31: Treatment of β-Hemoglobinopathy Using Edited Hematopoietic Stem Cells

[0589] The methods and genome editing systems disclosed herein may be used for the treatment of a β-hemoglobinopathy, such as sickle cell disease or beta-thalassemia, in a patient in need thereof. For example, genome editing may be performed on cells derived from the patient in an autologous procedure. Correction of the patient's cells ex-vivo and reintroduction of the cells into the patient may result in increased HbF expression and treatment of the β-hemoglobinopathy.

[0590] For example, HSCs may be extracted from the bone marrow of a patient with a β-hemoglobinopathy using techniques that are well-known to skilled artisans. The HSCs may be modified using methods disclosed herein for genome editing. For example, RNPs comprised of guide RNAs (gRNA) that target one or more regions in the HBG gene complexed with an RNA-guided nuclease may be used to edit the HSCs. In certain embodiments, the RNA-guided nuclease may be a Cpf1 protein. In certain embodiments, the Cpf1 protein may be a modified Cpf1 protein. In certain embodiments, the modified Cpf1 protein may be encoded by a sequence set forth in SEQ ID NOs:1000, 1001, 1008-1018, 1032, 1035-39, 1094-1097, 1107-09 (Cpf1 polypeptide sequences) or SEQ ID NOs:1019-1021, 1110-17 (Cpf1 polynucleotide sequences). For example, the modified Cpf1 protein may be encoded by the sequence set forth in SEQ ID NO:1097. In certain embodiments, the gRNA may be a modified or unmodified gRNA. In certain embodiments, the gRNA may comprise a sequence set forth in Table 13, Table 18, or Table 19. For example, in certain embodiments, the gRNA may comprise the sequence set forth in SEQ ID NO:1051. In certain embodiments, the RNP complex may comprise an RNP complex set forth in Table 21. For example, the RNP complex may include a gRNA comprising the sequence set forth in SEQ ID NO:1051 and a modified Cpf1 protein encoded by the sequence set forth in SEQ ID NO: 1097 (RNP32, Table 21). In certain embodiments, modified HSCs have an increase in the frequency or level of an indel in the human HBG1 gene, HBG2 gene, or both, relative to unmodified HSCs. In certain embodiments, the modified HSCs can differentiate into erythroid cells that express an increased level of HbF. A population of the modified HSCs may be selected for reintroduction into the patient via transfusion or other methods known to skilled artisans. The population of modified HSCs for reintroduction may be selected based on, for example, increased HbF expression of the erythroid progeny of the modified HSCs or increased indel frequency of the modified HSCs. In some embodiments, any form of ablation prior to reintroduction of the cells may be used to enhance engraftment of the modified HSCs. In other embodiments, peripheral blood stem cells (PBSCs) can be extracted from a patient with a β-hemoglobinopathy using techniques that are well-known to skilled artisans (e.g., apheresis or leukapheresis) and stem cells can be removed from the PBSCs. The genome editing methods described above can be performed on the stem cells and the modified stem cells can be reintroduced into the patient as described above.

TABLE 20
Cpf1 Protein Variants

| | Cpf1 Variant Amino | Cpf1 Variant Nucleotide |
|---|---|---|
| Cpf1 Variant ID | Acid SEQ ID NO | SEQ ID NO |
| His-AsCpf1-sNLS- | SEQ ID NO: 1032 | SEQ ID NO: 1110 |
| sNLS H800A | | |
| Cpf1-1 | SEQ ID NO: 1094 | SEQ ID NO: 1111 |
| Cpf1-2 | SEQ ID NO: 1095 | SEQ ID NO: 1112 |
| Cpf1-3 | SEQ ID NO: 1096 | SEQ ID NO: 1113 |
| Cpf1-4 | SEQ ID NO: 1097 | SEQ ID NO: 1114 |
| Cpf1-5 | SEQ ID NO: 1107 | SEQ ID NO: 1115 |
| Cpf1-6 | SEQ ID NO: 1108 | SEQ ID NO: 1116 |
| Cpf1-7 | SEQ ID NO: 1109 | SEQ ID NO: 1117 |

TABLE 21
RNP complexes

| RNP Name | gRNA SEQ ID NO* | Cpf1 Amino Acid SEQ ID NO** |
|---|---|---|
| RNP64 | SEQ ID NO: 1022 | SEQ ID NO: 1109 |
| RNP1 | SEQ ID NO: 1051 | SEQ ID NO: 1095 |
| RNP2 | SEQ ID NO: 1098 | SEQ ID NO: 1094 |
| RNP3 | SEQ ID NO: 1099 | SEQ ID NO: 1094 |
| RNP4 | SEQ ID NO: 1100 | SEQ ID NO: 1094 |
| RNP5 | SEQ ID NO: 1101 | SEQ ID NO: 1094 |
| RNP6 | SEQ ID NO: 1068 | SEQ ID NO: 1094 |
| RNP7 | SEQ ID NO: 1102 | SEQ ID NO: 1094 |
| RNP8 | SEQ ID NO: 1081 | SEQ ID NO: 1094 |
| RNP9 | SEQ ID NO: 1082 | SEQ ID NO: 1094 |
| RNP10 | SEQ ID NO: 1083 | SEQ ID NO: 1094 |
| RNP11 | SEQ ID NO: 1069 | SEQ ID NO: 1094 |
| RNP12 | SEQ ID NO: 1084 | SEQ ID NO: 1094 |
| RNP16 | SEQ ID NO: 1085 | SEQ ID NO: 1094 |
| RNP19 | SEQ ID NO: 1088 | SEQ ID NO: 1094 |
| RNP20 | SEQ ID NO: 1089 | SEQ ID NO: 1094 |
| RNP21 | SEQ ID NO: 1090 | SEQ ID NO: 1094 |
| RNP22 | SEQ ID NO: 1091 | SEQ ID NO: 1094 |
| RNP23 | SEQ ID NO: 1048 | SEQ ID NO: 1097 |
| RNP24 | SEQ ID NO: 1093 | SEQ ID NO: 1094 |
| RNP26 | SEQ ID NO: 1051 | SEQ ID NO: 1096 |
| RNP27 | SEQ ID NO: 1051 | SEQ ID NO: 1107 |
| RNP28 | SEQ ID NO: 1051 | SEQ ID NO: 1108 |
| RNP29 | SEQ ID NO: 1103 | SEQ ID NO: 1094 |
| RNP30 | SEQ ID NO: 1104 | SEQ ID NO: 1094 |
| RNP31 | SEQ ID NO: 1105 | SEQ ID NO: 1094 |
| RNP32 | SEQ ID NO: 1051 | SEQ ID NO: 1097 |
| RNP33 | SEQ ID NO: 1022 | SEQ ID NO: 1032 |
| RNP34 | SEQ ID NO: 1041 | SEQ ID NO: 1032 |
| RNP37 | SEQ ID NO: 1042 | SEQ ID NO: 1032 |
| RNP38 | SEQ ID NO: 1043 | SEQ ID NO: 1032 |
| RNP39 | SEQ ID NO: 1044 | SEQ ID NO: 1032 |
| RNP40 | SEQ ID NO: 1045 | SEQ ID NO: 1032 |
| RNP41 | SEQ ID NO: 1046 | SEQ ID NO: 1032 |
| RNP42 | SEQ ID NO: 1047 | SEQ ID NO: 1032 |
| RNP43 | SEQ ID NO: 1048 | SEQ ID NO: 1032 |
| RNP44 | SEQ ID NO: 1049 | SEQ ID NO: 1032 |
| RNP45 | SEQ ID NO: 1022 | SEQ ID NO: 1094 |
| RNP46 | SEQ ID NO: 1046 | SEQ ID NO: 1094 |
| RNP47 | SEQ ID NO: 1047 | SEQ ID NO: 1094 |
| RNP48 | SEQ ID NO: 1052 | SEQ ID NO: 1094 |
| RNP49 | SEQ ID NO: 1048 | SEQ ID NO: 1094 |
| RNP50 | SEQ ID NO: 1053 | SEQ ID NO: 1094 |
| RNP51 | SEQ ID NO: 1054 | SEQ ID NO: 1094 |
| RNP52 | SEQ ID NO: 1055 | SEQ ID NO: 1094 |
| RNP53 | SEQ ID NO: 1056 | SEQ ID NO: 1094 |
| RNP54 | SEQ ID NO: 1057 | SEQ ID NO: 1094 |
| RNP55 | SEQ ID NO: 1058 | SEQ ID NO: 1094 |
| RNP56 | SEQ ID NO: 1059 | SEQ ID NO: 1094 |
| RNP57 | SEQ ID NO: 1060 | SEQ ID NO: 1094 |
| RNP58 | SEQ ID NO: 1051 | SEQ ID NO: 1094 |
| RNP59 | SEQ ID NO: 1067 | SEQ ID NO: 1094 |
| RNP60 | SEQ ID NO: 1068 | SEQ ID NO: 1094 |
| RNP61 | SEQ ID NO: 1041 | SEQ ID NO: 1095 |
| RNP62 | SEQ ID NO: 1041 | SEQ ID NO: 1094 |
| RNP63 | SEQ ID NO: 1022 | SEQ ID NO: 1095 |

*See Table 19
**See Table 20

TABLE 22
Cpf1 HBG1 targeting domains and expected cleavage sites

| | gRNA | gRNA | Targeting | Expected | | |
|---|---|---|---|---|---|---|
| | Targeting | Targeting | Domain | cleavage site | | Targeting |
| gRNA | Domain | Domain | coordinates | coordinates | | Domain |
| ID | (RNA) | (DNA) | at HBG1 * | at HBG1^{#} | Strand | Length |
| HBG1-1 | CCUUGUCAA | CCTTGTCA | Chr11:5249954- | Chr11:5249973, | + | 20 |
| | GGCUAUUG | AGGCTATT | 5249974 | Chr11:5249977 | | |
| | GUC (SEQ | GGTC (SEQ | | | | |
| | ID NO: 1002) | ID NO: 1003) | | | | |
| HBG1-1 | CCUUGUCAA | CCTTGTCA | Chr11:5249954- | Chr11:5249973, | + | 21 |
| (21 mer) | GGCUAUUG | AGGCTATT | Chr11:5249975 | Chr11:5249977 | | |
| | GUCA (SEQ | GGTCA (SEQ | | | | |
| | ID NO: 1254) | ID NO: 1255) | | | | |
| HBG1-1 | CCUUGUCAA | CCTTGTCA | Chr11:5249954- | Chr11:5249973, | + | 22 |
| (22 mer) | GGCUAUUG | AGGCTATT | Chr11:5249976 | Chr11:5249977 | | |
| | GUCAA (SEQ | GGTCAA (SEQ | | | | |
| | ID NO: 1256) | ID NO: 1257) | | | | |
| HBG1-1 | CCUUGUCAA | CCTTGTCA | Chr11:5249954- | Chr11:5249973, | + | 23 |
| (23 mer) | GGCUAUUG | AGGCTATT | Chr11:5249976 | Chr11:5249977 | | |
| | GUCAAG | GGTCAAG | | | | |
| | (SEQ ID | (SEQ ID | | | | |
| | NO: 1258) | NO: 1259) | | | | |
| AsCpf1 | AGACAGAU | AGACAGAT | Chr11:5250023- | Chr11:5250042, | + | 20 |
| HBG1 | AUUUGCAU | ATTTGCATT | Chr11:5250043 | Chr11:5250046 | | |
| Promoter-1 | UGAG (SEQ | GAG (SEQ | | | | |
| | ID NO: 1139) | ID NO: 1140) | | | | |
| AsCpf1 | AGACAGAU | AGACAGAT | Chr11:5250023- | Chr11:5250042, | + | 21 |
| HBG1 | AUUUGCAU | ATTTGCATT | Chr11:5250044 | Chr11:5250046 | | |
| Promoter-1 | UGAGA (SEQ | GAGA (SEQ | | | | |
| (21 mer) | ID NO: 1260) | ID NO: 1261) | | | | |
| AsCpf1 | CAUUGAGA | CATTGAGA | Chr11:5250036- | Chr11:5250055, | + | 20 |
| HBG1 | UAGUGUGG | TAGTGTGG | Chr11:5250056 | Chr11:5250059 | | |
| Promoter-2 | GGAA (SEQ | GGAA (SEQ | | | | |
| | ID NO: 1141) | ID NO: 1142) | | | | |
| AsCpf1 | CAUUGAGA | CATTGAGA | Chr11:5250036- | Chr11:5250055, | + | 21 |
| HBG1 | UAGUGUGG | TAGTGTGG | Chr11:5250057 | Chr11:5250059 | | |
| Promoter-2 | GGAAG (SEQ | GGAAG (SEQ | | | | |
| (21 mer) | ID NO: 1262) | ID NO: 1263) | | | | |
| AsCpf1 | CUUCUCCCA | CTTCTCCCA | Chr11:5250160- | Chr11:5250179, | + | 20 |
| HBG1 | UCAUAGAG | TCATAGAG | Chr11:5250180 | Chr11:5250183 | | |
| Promoter-6 | GAU (SEQ | GAT (SEQ | | | | |
| | ID NO: 1149) | ID NO: 1150) | | | | |
| AsCpf1 | CUUCUCCCA | CTTCTCCCA | Chr11:5250160- | Chr11:5250179, | + | 21 |
| HBG1 | UCAUAGAG | TCATAGAG | Chr11:5250181 | Chr11:5250183 | | |
| Promoter-6 | GAUA (SEQ | GATA (SEQ | | | | |
| (21 mer) | ID NO: 1264) | ID NO: 1265) | | | | |

* NCBI Reference Sequence NC_000011, the coordinates are reported using the One-based coordinate system, “Homo sapiens chromosome 11, GRCh38.p12 Primary Assembly,” (Version NC_000011.10).
^{#}Expected cleavage sites based on Zetsche et al, 2015, coordinates are reported using zero-based coordinates.

TABLE 23
Cpf1 HBG2 targeting domains and expected cleavage sites

| | gRNA | gRNA | Targeting | Expected | | |
|---|---|---|---|---|---|---|
| | Targeting | Targeting | Domain | cleavage site | | Targeting |
| gRNA | Domain | Domain | coordinates at | coordinates at | | Domain |
| ID | (RNA) | (DNA) | HBG2 * | HBG2^{#} | Strand | Length |
| HBG1-1 | CCUUGUCAA | CCTTGTCAAG | Chr11:5254878 | Chr11:5254897, | + | 20 |
| | GGCUAUUG | GCTATTGGTC | Chr11:5254898 | Chr11:5254901 | | |
| | GUC (SEQ ID | (SEQ ID | | | | |
| | NO: 1002) | NO: 1003) | | | | |
| HBG1-1 | CCUUGUCAA | CCTTGTCAAG | Chr11:5254878 | Chr11:5254897, | + | 21 |
| 21 mer | GGCUAUUG | GCTATTGGTC | Chr11:5254899 | Chr11:5254901 | | |
| | GUCA (SEQ | A (SEQ ID | | | | |
| | ID NO: 1254) | NO: 1255) | | | | |
| HBG1-1 | CCUUGUCAA | CCTTGTCAAG | Chr11:5254878 | Chr11:5254897, | + | 22 |
| 22 mer | GGCUAUUG | GCTATTGGTC | Chr11:5254900 | Chr11:5254901 | | |
| | GUCAA (SEQ | AA (SEQ ID | | | | |
| | ID NO: 1256) | NO: 1257) | | | | |
| HBG1-1 | CCUUGUCAA | CCTTGTCAAG | Chr11:5254878 | Chr11:5254897, | + | 23 |
| 23 mer | GGCUAUUG | GCTATTGGTC | Chr11:5254901 | Chr11:5254901 | | |
| | GUCAAG | AAG (SEQ ID | | | | |
| | (SEQ ID | NO: 1259) | | | | |
| | NO: 1258) | | | | | |
| AsCpf1 | AGACAGAU | AGACAGATA | Chr11:5254947 | Chr11:5254966 | + | 20 |
| HBG1 | AUUUGCAU | TTTGCATTGA | Chr11:5254967 | Chr11:5254970 | | |
| Promoter-1 | UGAG (SEQ | G (SEQ ID | | | | |
| | ID NO: 1139) | NO: 1140) | | | | |
| AsCpf1 | AGACAGAU | AGACAGATA | Chr11:5254947 | Chr11:5254966 | + | 21 |
| HBG1 | AUUUGCAU | TTTGCATTGA | Chr11:5254968 | Chr11:5254970 | | |
| Promoter-1 | UGAGA (SEQ | GA (SEQ ID | | | | |
| (21 mer) | ID NO: 1260) | NO: 1261) | | | | |
| AsCpf1 | CAUUGAGA | CATTGAGAT | Chr11:5254960 | Chr11:5254979 | + | 20 |
| HBG1 | UAGUGUGG | AGTGTGGGG | Chr11:5254980 | Chr11:5254983 | | |
| Promoter-2 | GGAA (SEQ | AA | | | | |
| | ID NO: 1141) | (SEQ ID | | | | |
| | | NO: 1142) | | | | |
| AsCpf1 | CAUUGAGA | CATTGAGAT | Chr11:5254960 | Chr11:5254979 | + | 21 |
| HBG1 | UAGUGUGG | AGTGTGGGG | Chr11:5254981 | Chr11:5254983 | | |
| Promoter-2 | GGAAG (SEQ | AAG (SEQ ID | | | | |
| (21 mer) | ID NO: 1262) | NO: 1263) | | | | |

* NCBI Reference Sequence NC_000011, the coordinates are reported using the One-based coordinate system, “Homo sapiens chromosome 11, GRCh38.p12 Primary Assembly,” (Version NC_000011.10).
^{#}Expected cleavage sites based on (Zetsche et al, 2015), coordinates are reported using zero-based coordinates.

TABLE 24
gRNA 5′ Extensions

| 5′ extension | | |
|---|---|---|
| Sequence ID | | 5′ |
| No: | 5′ extension sequence | modification |
| 1231 | rCrUrUrUrU | +5 RNA |
| 1232 | rArArGrArCrCrUrUrUrU | +10 RNA |
| 1233 | rArUrGrUrGrUrUrUrUrUr | +25 RNA |
| | GrUrCrArArArArGrArCrC | |
| | rUrUrUrU | |
| 1234 | rArGrGrCrCrArGrCrUrUr | +60 RNA |
| | GrCrCrGrGrUrUrUrUrUrU | |
| | rArGrUrCrGrUrGrCrUrGr | |
| | CrUrUrCrArUrGrUrGrUrU | |
| | rUrUrUrGrUrCrArArArAr | |
| | GrArCrCrUrUrUrU | |
| 1235 | CTTTT | +5 DNA |
| 1236 | AAGACCTTTT | +10 DNA |
| 1237 | ATGTGTTTTTGTCAAAAGACC | +25 DNA |
| | TTTT | |
| 1238 | AGGCCAGCTTGCCGGTTTTTT | +60 DNA |
| | AGTCGTGCTGCTTCATGTGTT | |
| | TTTGTCAAAAGACCTTTT | |
| 1239 | TTTTTGTCAAAAGACCTTTT | +20 DNA |
| 1240 | GCTTCATGTGTTTTTGTCAAA | +30 DNA |
| | AGACCTTTT | |
| 1241 | GCCGGTTTTTTAGTCGTGCTG | +50 DNA |
| | CTTCATGTGTTTTTGTCAAAA | |
| | GACCTTTT | |
| 1242 | TAGTCGTGCTGCTTCATGTGT | +40 DNA |
| | TTTTGTCAAAAGACCTTTT | |
| 1243 | C*C*GAAGTTTTCTTCGGTTT | +20 DNA + |
| | T | 2xPS |
| 1244 | T*T*TTTCCGAAGTTTTCTTC | +25 DNA + |
| | GGTTTT | 2xPS |
| 1245 | A*A*CGCTTTTTCCGAAGTTT | +30 DNA + |
| | TCTTCGGTTTT | 2xPS |
| 1246 | G*C*GTTGTTTTCAACGCTTT | +41 DNA + |
| | TTCCGAAGTTTTCTTCGGTTT | 2xPS |
| | T | |
| 1247 | G*G*CTTCTTTTGAAGCCTTT | +62 DNA + |
| | TTGCGTTGTTTTCAACGCTTT | 2xPS |
| | TTCCGAAGTTTTCTTCGGTTT | |
| | T | |
| 1248 | A*T*GTGTTTTTGTCAAAAGA | +25 DNA + |
| | CCTTTT | 2xPS |
| 1249 | AAAAAAAAAAAAAAAAAAAAA | +25 A |
| | AAAA | |
| 1250 | TTTTTTTTTTTTTTTTTTTTT | +25 T |
| | TTTT | |
| 1251 | mA*mU*rGrUrGrUrUrUrUr | +25 RNA + |
| | UrGrUrCrArArArArGrArC | 2xPS |
| | rCrUrUrUrU | |
| 1252 | mA*mA*rArArArArArArAr | PolyA RNA + |
| | ArArArArArArArArArArA | 2xPS |
| | rArArArArA | |
| 1253 | mU*mU*rUrUrUrUrUrUrUr | PolyU RNA + |
| | UrUrUrUrUrUrUrUrUrUrU | 2xPS |
| | rUrUrUrUrU | |

All bases are in upper case
Lowercase “r” represents RNA, 2′-hydroxy; bases not modified by an “r” are DNA
All bases are linked via standard phosphodiester bonds except as noted:
“*” represents phosphorothioate modification
“PS” represents phosphorothioate modification

TABLE 19
Cpf1 guide RNAs

| | | | | Length of | | |
|---|---|---|---|---|---|---|
| gRNA | | | | crRNA + | Length of | gRNA |
| Sequence | | | | gRNA | gRNA | Targeting |
| SEQ ID | | | | targeting | targeting | Domain |
| NO. | gRNA Sequence | 5′ mod.** | 3′ mod. | domain | domain | (RNA) |
| 1022 | rUrArArUrUrUrCrUr | — | — | 40 | 20 | CCUUGUCAA |
| | ArCrUrCrUrUrGrUrA | | | | | GGCUAUUGG |
| | rGrArUrCrCrUrUrGr | | | | | UC (SEQ ID |
| | UrCrArArGrGrCrUrA | | | | | NO: 1002) |
| | rUrUrGrGrUrC | | | | | |
| 1023 | rUrArArUrUrUrCrUr | — | 1xPS2- | 41 | 21 | CCUUGUCAA |
| | ArCrUrCrUrUrGrUrA | | OMe + | | | GGCUAUUGG |
| | rGrArUrCrCrUrUrGr | | 1xOMe | | | UCA (SEQ ID |
| | UrCrArArGrGrCrUrA | | | | | NO: 1254) |
| | rUrUrGrGrUmC/PS2/ | | | | | |
| | mA | | | | | |
| 1041 | rUrArArUrUrUrCrUr | — | 1xPS2- | 40 | 20 | CCUUGUCAA |
| | ArCrUrCrUrUrGrUrA | | OMe + | | | GGCUAUUGG |
| | rGrArUrCrCrUrUrGr | | 1xOMe | | | UC (SEQ ID |
| | UrCrArArGrGrCrUrA | | | | | NO: 1002) |
| | rUrUrGrGmU/PS2/mC | | | | | |
| 1042 | rCrUrUrUrUrUrArAr | +5 RNA | — | 45 | 20 | CCUUGUCAA |
| | UrUrUrCrUrArCrUrC | | | | | GGCUAUUGG |
| | rUrUrGrUrArGrArUr | | | | | UC (SEQ ID |
| | CrCrUrUrGrUrCrArA | | | | | NO: 1002) |
| | rGrGrCrUrArUrUrGr | | | | | |
| | GrUrC | | | | | |
| 1043 | rArArGrArCrCrUrUr | +10 RNA | — | 50 | 20 | CCUUGUCAA |
| | UrUrUrArArUrUrUrC | | | | | GGCUAUUGG |
| | rUrArCrUrCrUrUrGr | | | | | UC (SEQ ID |
| | UrArGrArUrCrCrUrU | | | | | NO: 1002) |
| | rGrUrCrArArGrGrCr | | | | | |
| | UrArUrUrGrGrUrC | | | | | |
| 1044 | rArUrGrUrGrUrUrUr | +25 RNA | — | 65 | 20 | CCUUGUCAA |
| | UrUrGrUrCrArArArA | | | | | GGCUAUUGG |
| | rGrArCrCrUrUrUrUr | | | | | UC (SEQ ID |
| | UrArArUrUrUrCrUrA | | | | | NO: 1002) |
| | rCrUrCrUrUrGrUrAr | | | | | |
| | GrArUrCrCrUrUrGrU | | | | | |
| | rCrArArGrGrCrUrAr | | | | | |
| | UrUrGrGrUrC | | | | | |
| 1045 | rArGrGrCrCrArGrCr | +60 RNA | — | 100 | 20 | CCUUGUCAA |
| | UrUrGrCrCrGrGrUrU | | | | | GGCUAUUGG |
| | rUrUrUrUrArGrUrCr | | | | | UC (SEQ ID |
| | GrUrGrCrUrGrCrUrU | | | | | NO: 1002) |
| | rCrArUrGrUrGrUrUr | | | | | |
| | UrUrUrGrUrCrArArA | | | | | |
| | rArGrArCrCrUrUrUr | | | | | |
| | UrUrArArUrUrUrCrU | | | | | |
| | rArCrUrCrUrUrGrUr | | | | | |
| | ArGrArUrCrCrUrUrG | | | | | |
| | rUrCrArArGrGrCrUr | | | | | |
| | ArUrUrGrGrUrC | | | | | |
| 1046 | CTTTTrUrArArUrUr | +5 DNA | — | 45 | 20 | CCUUGUCAA |
| | UrCrUrArCrUrCrUrU | | | | | GGCUAUUGG |
| | rGrUrArGrArUrCrCr | | | | | UC (SEQ ID |
| | UrUrGrUrCrArArGrG | | | | | NO: 1002) |
| | rCrUrArUrUrGrGrUr | | | | | |
| | C | | | | | |
| 1047 | AAGACCTTTTrUrAr | +10 DNA | — | 50 | 20 | CCUUGUCAA |
| | ArUrUrUrCrUrArCrU | | | | | GGCUAUUGG |
| | rCrUrUrGrUrArGrAr | | | | | UC (SEQ ID |
| | UrCrCrUrUrGrUrCrA | | | | | NO: 1002) |
| | rArGrGrCrUrArUrUr | | | | | |
| | GrGrUrC | | | | | |
| 1048 | ATGTGTTTTTGTCA | +25 DNA | — | 65 | 20 | CCUUGUCAA |
| | AAAGACCTTTTrUr | | | | | GGCUAUUGG |
| | ArArUrUrUrCrUrArC | | | | | UC (SEQ ID |
| | rUrCrUrUrGrUrArGr | | | | | NO: 1002) |
| | ArUrCrCrUrUrGrUrC | | | | | |
| | rArArGrGrCrUrArUr | | | | | |
| | UrGrGrUrC | | | | | |
| 1049 | AGGCCAGCTTGCC | +60 DNA | — | 100 | 20 | CCUUGUCAA |
| | GGTTTTTTAGTCGT | | | | | GGCUAUUGG |
| | GCTGCTTCATGTG | | | | | UC (SEQ ID |
| | TTTTTGTCAAAAG | | | | | NO: 1002) |
| | ACCTTTTrUrArArUr | | | | | |
| | UrUrCrUrArCrUrCrU | | | | | |
| | rUrGrUrArGrArUrCr | | | | | |
| | CrUrUrGrUrCrArArG | | | | | |
| | rGrCrUrArUrUrGrGr | | | | | |
| | UrC | | | | | |
| 1050 | ATGTGTTTTTGTCA | +25 DNA | 1xPS2- | 66 | 21 | CCUUGUCAA |
| | AAAGACCTTTTrUr | | OMe + | | | GGCUAUUGG |
| | ArArUrUrUrCrUrArC | | 1xOMe | | | UCA (SEQ ID |
| | rUrCrUrUrGrUrArGr | | | | | NO: 1254) |
| | ArUrCrCrUrUrGrUrC | | | | | |
| | rArArGrGrCrUrArUr | | | | | |
| | UrGrGrUmC/PS2/mA | | | | | |
| 1051 | ATGTGTTTTTGTCA | +25 DNA | 1xPS- | 66 | 21 | CCUUGUCAA |
| | AAAGACCTTTTrUr | | OMe | | | GGCUAUUGG |
| | ArArUrUrUrCrUrArC | | | | | UCA (SEQ ID |
| | rUrCrUrUrGrUrArGr | | | | | NO: 1254) |
| | ArUrCrCrUrUrGrUrC | | | | | |
| | rArArGrGrCrUrArUr | | | | | |
| | UrGrGrUrC*mA | | | | | |
| 1052 | TTTTTGTCAAAAG | +20 DNA | — | 60 | 20 | CCUUGUCAA |
| | ACCTTTTrUrArArUr | | | | | GGCUAUUGG |
| | UrUrCrUrArCrUrCrU | | | | | UC (SEQ ID |
| | rUrGrUrArGrArUrCr | | | | | NO: 1002) |
| | CrUrUrGrUrCrArArG | | | | | |
| | rGrCrUrArUrUrGrGr | | | | | |
| | UrC | | | | | |
| 1053 | GCTTCATGTGTTTT | +30 DNA | — | 70 | 20 | CCUUGUCAA |
| | TGTCAAAAGACCT | | | | | GGCUAUUGG |
| | TTTrUrArArUrUrUrC | | | | | UC (SEQ ID |
| | rUrArCrUrCrUrUrGr | | | | | NO: 1002) |
| | UrArGrArUrCrCrUrU | | | | | |
| | rGrUrCrArArGrGrCr | | | | | |
| | UrArUrUrGrGrUrC | | | | | |
| 1054 | GCCGGTTTTTTAG | +50 DNA | — | 90 | 20 | CCUUGUCAA |
| | TCGTGCTGCTTCA | | | | | GGCUAUUGG |
| | TGTGTTTTTGTCAA | | | | | UC (SEQ ID |
| | AAGACCTTTTrUrAr | | | | | NO: 1002) |
| | ArUrUrUrCrUrArCrU | | | | | |
| | rCrUrUrGrUrArGrAr | | | | | |
| | UrCrCrUrUrGrUrCrA | | | | | |
| | rArGrGrCrUrArUrUr | | | | | |
| | GrGrUrC | | | | | |
| 1055 | TAGTCGTGCTGCT | +40 DNA | — | 80 | 20 | CCUUGUCAA |
| | TCATGTGTTTTTGT | | | | | GGCUAUUGG |
| | CAAAAGACCTTTTr | | | | | UC (SEQ ID |
| | UrArArUrUrUrCrUrA | | | | | NO: 1002) |
| | rCrUrCrUrUrGrUrAr | | | | | |
| | GrArUrCrCrUrUrGrU | | | | | |
| | rCrArArGrGrCrUrAr | | | | | |
| | UrUrGrGrUrC | | | | | |
| 1056 | C*C*GAAGTTTTCT | +20 DNA + | — | 60 | 20 | CCUUGUCAA |
| | TCGGTTTTrUrArAr | 2xPS | | | | GGCUAUUGG |
| | UrUrUrCrUrArCrUrC | | | | | UC (SEQ ID |
| | rUrUrGrUrArGrArUr | | | | | NO: 1002) |
| | CrCrUrUrGrUrCrArA | | | | | |
| | rGrGrCrUrArUrUrGr | | | | | |
| | GrUrC | | | | | |
| 1057 | T*T*TTTCCGAAGT | +25 DNA + | — | 65 | 20 | CCUUGUCAA |
| | TTTCTTCGGTTTTr | 2xPS | | | | GGCUAUUGG |
| | UrArArUrUrUrCrUrA | | | | | UC (SEQ ID |
| | rCrUrCrUrUrGrUrAr | | | | | NO: 1002) |
| | GrArUrCrCrUrUrGrU | | | | | |
| | rCrArArGrGrCrUrAr | | | | | |
| | UrUrGrGrUrC | | | | | |
| 1058 | A*A*CGCTTTTTCC | +30 DNA + | — | 70 | 20 | CCUUGUCAA |
| | GAAGTTTTCTTCG | 2xPS | | | | GGCUAUUGG |
| | GTTTTrUrArArUrUr | | | | | UC (SEQ ID |
| | UrCrUrArCrUrCrUrU | | | | | NO: 1002) |
| | rGrUrArGrArUrCrCr | | | | | |
| | UrUrGrUrCrArArGrG | | | | | |
| | rCrUrArUrUrGrGrUr | | | | | |
| | C | | | | | |
| 1059 | G*C*GTTGTTTTCA | +41 DNA + | — | 81 | 20 | CCUUGUCAA |
| | ACGCTTTTTCCGA | 2xPS | | | | GGCUAUUGG |
| | AGTTTTCTTCGGTT | | | | | UC (SEQ ID |
| | TTrUrArArUrUrUrCr | | | | | NO: 1002) |
| | UrArCrUrCrUrUrGrU | | | | | |
| | rArGrArUrCrCrUrUr | | | | | |
| | GrUrCrArArGrGrCrU | | | | | |
| | rArUrUrGrGrUrC | | | | | |
| 1060 | G*G*CTTCTTTTGA | +62 DNA + | — | 102 | 20 | CCUUGUCAA |
| | AGCCTTTTTGCGTT | 2xPS | | | | GGCUAUUGG |
| | GTTTTCAACGCTTT | | | | | UC (SEQ ID |
| | TTCCGAAGTTTTCT | | | | | NO: 1002) |
| | TCGGTTTTrUrArAr | | | | | |
| | UrUrUrCrUrArCrUrC | | | | | |
| | rUrUrGrUrArGrArUr | | | | | |
| | CrCrUrUrGrUrCrArA | | | | | |
| | rGrGrCrUrArUrUrGr | | | | | |
| | GrUrC | | | | | |
| 1061 | mUrArArUrUrUrCrUr | 1xOMe | — | 40 | 20 | CCUUGUCAA |
| | ArCrUrCrUrUrGrUrA | | | | | GGCUAUUGG |
| | rGrArUrCrCrUrUrGr | | | | | UC (SEQ ID |
| | UrCrArArGrGrCrUrA | | | | | NO: 1002) |
| | rUrUrGrGrUrC | | | | | |
| 1062 | mU* rArArUrUrUrCr | 1xPS-OMe | — | 40 | 20 | CCUUGUCAA |
| | UrArCrUrCrUrUrGrU | | | | | GGCUAUUGG |
| | rArGrArUrCrCrUrUr | | | | | UC (SEQ ID |
| | GrUrCrArArGrGrCrU | | | | | NO: 1002) |
| | rArUrUrGrGrUrC | | | | | |
| 1063 | mUmArArUrUrUrCr | 2xOMe | — | 40 | 20 | CCUUGUCAA |
| | UrArCrUrCrUrUrGrU | | | | | GGCUAUUGG |
| | rArGrArUrCrCrUrUr | | | | | UC (SEQ ID |
| | GrUrCrArArGrGrCrU | | | | | NO: 1002) |
| | rArUrUrGrGrUrC | | | | | |
| 1064 | mU*mA*rArUrUrUr | 2xPS-OMe | — | 40 | 20 | CCUUGUCAA |
| | CrUrArCrUrCrUrUrG | | | | | GGCUAUUGG |
| | rUrArGrArUrCrCrUr | | | | | UC (SEQ ID |
| | UrGrUrCrArArGrGrC | | | | | NO: 1002) |
| | rUrArUrUrGrGrUrC | | | | | |
| 1065 | mUmAmArUrUrUrCr | 3xOMe | — | 40 | 20 | CCUUGUCAA |
| | UrArCrUrCrUrUrGrU | | | | | GGCUAUUGG |
| | rArGrArUrCrCrUrUr | | | | | UC (SEQ ID |
| | GrUrCrArArGrGrCrU | | | | | NO: 1002) |
| | rArUrUrGrGrUrC | | | | | |
| 1066 | mU*mA*mA*rUrUrU | 3xPS-OMe | — | 40 | 20 | CCUUGUCAA |
| | rCrUrArCrUrCrUrUr | | | | | GGCUAUUGG |
| | GrUrArGrArUrCrCrU | | | | | UC (SEQ ID |
| | rUrGrUrCrArArGrGr | | | | | NO: 1002) |
| | CrUrArUrUrGrGrUrC | | | | | |
| 1067 | A*T*GTGTTTTTGT | +25 DNA + | — | 65 | 20 | CCUUGUCAA |
| | CAAAAGACCTTTTr | 2xPS | | | | GGCUAUUGG |
| | UrArArUrUrUrCrUrA | | | | | UC (SEQ ID |
| | rCrUrCrUrUrGrUrAr | | | | | NO: 1002) |
| | GrArUrCrCrUrUrGrU | | | | | |
| | rCrArArGrGrCrUrAr | | | | | |
| | UrUrGrGrUrC | | | | | |
| 1068 | A*T*GTGTTTTTGT | +25 DNA + | 1xPS- | 66 | 21 | CCUUGUCAA |
| | CAAAAGACCTTTTr | 2xPS | OMe | | | GGCUAUUGG |
| | UrArArUrUrUrCrUrA | | | | | UCA (SEQ ID |
| | rCrUrCrUrUrGrUrAr | | | | | NO: 1254) |
| | GrArUrCrCrUrUrGrU | | | | | |
| | rCrArArGrGrCrUrAr | | | | | |
| | UrUrGrGrUrC*mA | | | | | |
| 1069 | rUrArArUrUrUrCrUr | — | 1xPS- | 41 | 21 | CCUUGUCAA |
| | ArCrUrCrUrUrGrUrA | | OMe | | | GGCUAUUGG |
| | rGrArUrCrCrUrUrGr | | | | | UCA (SEQ ID |
| | UrCrArArGrGrCrUrA | | | | | NO: 1254) |
| | rUrUrGrGrUrC*mA | | | | | |
| 1070 | rUrArArUrUrUrCrUr | — | 1xPS- | 42 | 21 | CCUUGUCAA |
| | ArCrUrCrUrUrGrUrA | | OMe + rU | | | GGCUAUUGG |
| | rGrArUrCrCrUrUrGr | | | | | UCA (SEQ ID |
| | UrCrArArGrGrCrUrA | | | | | NO: 1254) |
| | rUrUrGrGrUrCmA*r | | | | | |
| | U | | | | | |
| 1071 | rUrArArUrUrUrCrUr | — | rU | 41 | 20 | CCUUGUCAA |
| | ArCrUrCrUrUrGrUrA | | | | | GGCUAUUGG |
| | rGrArUrCrCrUrUrGr | | | | | UC (SEQ ID |
| | UrCrArArGrGrCrUrA | | | | | NO: 1002) |
| | rUrUrGrGrUrCrU | | | | | |
| 1072 | rUrArArUrUrUrCrUr | — | rU | 42 | 21 | CCUUGUCAA |
| | ArCrUrCrUrUrGrUrA | | | | | GGCUAUUGG |
| | rGrArUrCrCrUrUrGr | | | | | UCA (SEQ ID |
| | UrCrArArGrGrCrUrA | | | | | NO: 1254) |
| | rUrUrGrGrUrCrArU | | | | | |
| 1073 | rUrArArUrUrUrCrUr | — | rU | 44 | 23 | CCUUGUCAA |
| | ArCrUrCrUrUrGrUrA | | | | | GGCUAUUGG |
| | rGrArUrCrCrUrUrGr | | | | | UCAAG (SEQ |
| | UrCrArArGrGrCrUrA | | | | | ID NO: 1258) |
| | rUrUrGrGrUrCrArAr | | | | | |
| | GrU | | | | | |
| 1074 | A*T*GTGTTTTTGT | +25 DNA + | rU | 66 | 20 | CCUUGUCAA |
| | CAAAAGACCTTTTr | 2xPS | | | | GGCUAUUGG |
| | UrArArUrUrUrCrUrA | | | | | UC (SEQ ID |
| | rCrUrCrUrUrGrUrAr | | | | | NO: 1002) |
| | GrArUrCrCrUrUrGrU | | | | | |
| | rCrArArGrGrCrUrAr | | | | | |
| | UrUrGrGrUrCrU | | | | | |
| 1075 | A*T*GTGTTTTTGT | +25 DNA + | rU | 69 | 23 | CCUUGUCAA |
| | CAAAAGACCTTTTr | 2xPS | | | | GGCUAUUGG |
| | UrArArUrUrUrCrUrA | | | | | UCAAG (SEQ |
| | rCrUrCrUrUrGrUrAr | | | | | ID NO: 1258) |
| | GrArUrCrCrUrUrGrU | | | | | |
| | rCrArArGrGrCrUrAr | | | | | |
| | UrUrGrGrUrCrArArG | | | | | |
| | rU | | | | | |
| 1076 | rUrArArUrUrUrCrUr | — | — | 41 | 21 | CCUUGUCAA |
| | ArCrUrCrUrUrGrUrA | | | | | GGCUAUUGG |
| | rGrArUrCrCrUrUrGr | | | | | UCA (SEQ ID |
| | UrCrArArGrGrCrUrA | | | | | NO: 1254) |
| | rUrUrGrGrUrCrA | | | | | |
| 1077 | rUrArArUrUrUrCrUr | — | — | 43 | 23 | CCUUGUCAA |
| | ArCrUrCrUrUrGrUrA | | | | | GGCUAUUGG |
| | rGrArUrCrCrUrUrGr | | | | | UCAAG (SEQ |
| | UrCrArArGrGrCrUrA | | | | | ID NO: 1258) |
| | rUrUrGrGrUrCrArAr | | | | | |
| | G | | | | | |
| 1078 | A*T*GTGTTTTTGT | +25 DNA + | — | 68 | 23 | CCUUGUCAA |
| | CAAAAGACCTTTTr | 2xPS | | | | GGCUAUUGG |
| | UrArArUrUrUrCrUrA | | | | | UCAAG (SEQ |
| | rCrUrCrUrUrGrUrAr | | | | | ID NO: 1258) |
| | GrArUrCrCrUrUrGrU | | | | | |
| | rCrArArGrGrCrUrAr | | | | | |
| | UrUrGrGrUrCrArArG | | | | | |
| 1079 | rUrArArUrUrUrCrUr | — | 4xrU | 44 | 20 | CCUUGUCAA |
| | ArCrUrCrUrUrGrUrA | | | | | GGCUAUUGG |
| | rGrArUrCrCrUrUrGr | | | | | UC (SEQ ID |
| | UrCrArArGrGrCrUrA | | | | | NO: 1002) |
| | rUrUrGrGrUrCrUrUr | | | | | |
| | UrU | | | | | |
| 1080 | rUrArArUrUrUrCrUr | — | 3xPS- | 44 | 20 | CCUUGUCAA |
| | ArCrUrCrUrUrGrUrA | | OMe-U + | | | GGCUAUUGG |
| | rGrArUrCrCrUrUrGr | | rU | | | UC (SEQ ID |
| | UrCrArArGrGrCrUrA | | | | | NO: 1002) |
| | rUrUrGrGrUrCmU*m | | | | | |
| | U*mU*rU | | | | | |
| 1081 | A*T*GTGTTTTTGT | +25 DNA + | 4xrU | 69 | 20 | CCUUGUCAA |
| | CAAAAGACCTTTTr | 2xPS | | | | GGCUAUUGG |
| | UrArArUrUrUrCrUrA | | | | | UC (SEQ ID |
| | rCrUrCrUrUrGrUrAr | | | | | NO: 1002) |
| | GrArUrCrCrUrUrGrU | | | | | |
| | rCrArArGrGrCrUrAr | | | | | |
| | UrUrGrGrUrCrUrUrU | | | | | |
| | rU | | | | | |
| 1082 | AAAAAAAAAAAA | +25 A | 1xPS- | 66 | 21 | CCUUGUCAA |
| | AAAAAAAAAAAA | | OMe | | | GGCUAUUGG |
| | ArUrArArUrUrUrCrU | | | | | UCA (SEQ ID |
| | rArCrUrCrUrUrGrUr | | | | | NO: 1254) |
| | ArGrArUrCrCrUrUrG | | | | | |
| | rUrCrArArGrGrCrUr | | | | | |
| | ArUrUrGrGrUrC*mA | | | | | |
| 1083 | TTTTTTTTTTTTTTT | +25 T | 1xPS- | 66 | 21 | CCUUGUCAA |
| | TTTTTTTTTTrUrAr | | OMe | | | GGCUAUUGG |
| | ArUrUrUrCrUrArCrU | | | | | UCA (SEQ ID |
| | rCrUrUrGrUrArGrAr | | | | | NO: 1254) |
| | UrCrCrUrUrGrUrCrA | | | | | |
| | rArGrGrCrUrArUrUr | | | | | |
| | GrGrUrC*mA | | | | | |
| 1084 | C*C*GAAGTTTTCT | +20 DNA + | 1xPS- | 61 | 21 | CCUUGUCAA |
| | TCGGTTTTrUrArAr | 2xPS | OMe | | | GGCUAUUGG |
| | UrUrUrCrUrArCrUrC | | | | | UCA (SEQ ID |
| | rUrUrGrUrArGrArUr | | | | | NO: 1254) |
| | CrCrUrUrGrUrCrArA | | | | | |
| | rGrGrCrUrArUrUrGr | | | | | |
| | GrUrC*mA | | | | | |
| 1085 | rUrArArUrUrUrCrUr | — | 1xPS- | 41 | 21 | AGACAGAUA |
| | ArCrUrCrUrUrGrUrA | | OMe | | | UUUGCAUUG |
| | rGrArUrArGrArCrAr | | | | | AGA (SEQ ID |
| | GrArUrArUrUrUrGrC | | | | | NO: 1260) |
| | rArUrUrGrArG*mA | | | | | |
| 1086 | ATGTGTTTTTGTCA | +25 DNA | 1xPS- | 66 | 21 | AGACAGAUA |
| | AAAGACCTTTTrUr | | OMe | | | UUUGCAUUG |
| | ArArUrUrUrCrUrArC | | | | | AGA (SEQ ID |
| | rUrCrUrUrGrUrArGr | | | | | NO: 1260) |
| | ArUrArGrArCrArGrA | | | | | |
| | rUrArUrUrUrGrCrAr | | | | | |
| | UrUrGrArG*mA | | | | | |
| 1087 | C*C*GAAGTTTTCT | +20 DNA + | 1xPS- | 61 | 21 | AGACAGAUA |
| | TCGGTTTTrUrArAr | 2xPS | OMe | | | UUUGCAUUG |
| | UrUrUrCrUrArCrUrC | | | | | AGA (SEQ ID |
| | rUrUrGrUrArGrArUr | | | | | NO: 1260) |
| | ArGrArCrArGrArUrA | | | | | |
| | rUrUrUrGrCrArUrUG | | | | | |
| | rArG*mA | | | | | |
| 1088 | rUrArArUrUrUrCrUr | — | 1xPS- | 41 | 21 | CAUUGAGAU |
| | ArCrUrCrUrUrGrUrA | | OMe | | | AGUGUGGGG |
| | rGrArUrCrArUrUrGr | | | | | AAG (SEQ ID |
| | ArGrArUrArGrUrGrU | | | | | NO: 1262) |
| | rGrGrGrGrArA*mG | | | | | |
| 1089 | ATGTGTTTTTGTCA | +25 DNA | 1xPS- | 66 | 21 | CAUUGAGAU |
| | AAAGACCTTTTrUr | | OMe | | | AGUGUGGGG |
| | ArArUrUrUrCrUrArC | | | | | AAG (SEQ ID |
| | rUrCrUrUrGrUrArGr | | | | | NO: 1262) |
| | ArUrCrArUrUrGrArG | | | | | |
| | rArUrArGrUrGrUrGr | | | | | |
| | GrGrGrArA*mG | | | | | |
| 1090 | C*C*GAAGTTTTCT | +20 DNA + | 1xPS- | 61 | 21 | CAUUGAGAU |
| | TCGGTTTTrUrArAr | 2xPS | OMe | | | AGUGUGGGG |
| | UrUrUrCrUrArCrUrC | | | | | AAG (SEQ ID |
| | rUrUrGrUrArGrArUr | | | | | NO: 1262) |
| | CrArUrUrGrArGrArU | | | | | |
| | rArGrUrGrUrGrGrGr | | | | | |
| | GrArA*mG | | | | | |
| 1091 | rUrArArUrUrUrCrUr | — | 1xPS- | 41 | 21 | CUUCUCCCAU |
| | ArCrUrCrUrUrGrUrA | | OMe | | | CAUAGAGGA |
| | rGrArUrCrUrUrCrUr | | | | | UA (SEQ ID |
| | CrCrCrArUrCrArUrA | | | | | NO: 1264) |
| | rGrArGrGrArU*mA | | | | | |
| 1092 | ATGTGTTTTTGTCA | +25 DNA | 1xPS- | 66 | 21 | CUUCUCCCAU |
| | AAAGACCTTTTrUr | | OMe | | | CAUAGAGGA |
| | ArArUrUrUrCrUrArC | | | | | UA (SEQ ID |
| | rUrCrUrUrGrUrArGr | | | | | NO: 1264) |
| | ArUrCrUrUrCrUrCrC | | | | | |
| | rCrArUrCrArUrArGr | | | | | |
| | ArGrGrArU*mA | | | | | |
| 1093 | C*C*GAAGTTTTCT | +20 DNA + | 1xPS- | 61 | 21 | CUUCUCCCAU |
| | TCGGTTTTrUrArAr | 2xPS | OMe | | | CAUAGAGGA |
| | UrUrUrCrUrArCrUrC | | | | | UA (SEQ ID |
| | rUrUrGrUrArGrArUr | | | | | NO: 1264) |
| | CrUrUrCrUrCrCrCrA | | | | | |
| | rUrCrArUrArGrArGr | | | | | |
| | GrArU*mA | | | | | |
| 1098 | A*T*GTGTTTTTGT | +25 DNA + | 1xPS- | 67 | 21 | CCUUGUCAA |
| | CAAAAGACCTTTTr | 2xPS | OMe + rU | | | GGCUAUUGG |
| | UrArArUrUrUrCrUrA | | | | | UCA (SEQ ID |
| | rCrUrCrUrUrGrUrAr | | | | | NO: 1254) |
| | GrArUrCrCrUrUrGrU | | | | | |
| | rCrArArGrGrCrUrAr | | | | | |
| | UrUrGrGrUrCmA*rU | | | | | |
| 1099 | A*T*GTGTTTTTGT | +25 DNA + | 2xPS- | 68 | 22 | CCUUGUCAA |
| | CAAAAGACCTTTTr | 2xPS | OMe + rU | | | GGCUAUUGG |
| | UrArArUrUrUrCrUrA | | | | | UCAA (SEQ ID |
| | rCrUrCrUrUrGrUrAr | | | | | NO: 1256) |
| | GrArUrCrCrUrUrGrU | | | | | |
| | rCrArArGrGrCrUrAr | | | | | |
| | UrUrGrGrUrCmA*m | | | | | |
| | A*rU | | | | | |
| 1100 | A*T*GTGTTTTTGT | +25 DNA + | 1xPS- | 66 | 20 | CCUUGUCAA |
| | CAAAAGACCTTTTr | 2xPS | OMe + rU | | | GGCUAUUGG |
| | UrArArUrUrUrCrUrA | | | | | UC (SEQ ID |
| | rCrUrCrUrUrGrUrAr | | | | | NO: 1002) |
| | GrArUrCrCrUrUrGrU | | | | | |
| | rCrArArGrGrCrUrAr | | | | | |
| | UrUrGrGrUmC*rU | | | | | |
| 1101 | A*T*GTGTTTTTGT | +25 DNA + | 1xPS- | 65 | 20 | CCUUGUCAA |
| | CAAAAGACCTTTTr | 2xPS | OMe | | | GGCUAUUGG |
| | UrArArUrUrUrCrUrA | | | | | UC (SEQ ID |
| | rCrUrCrUrUrGrUrAr | | | | | NO: 1002) |
| | GrArUrCrCrUrUrGrU | | | | | |
| | rCrArArGrGrCrUrAr | | | | | |
| | UrUrGrGrU*mC | | | | | |
| 1102 | A*T*GTGTTTTTGT | +25 DNA + | 2xPS- | 67 | 22 | CCUUGUCAA |
| | CAAAAGACCTTTTr | 2xPS | OMe | | | GGCUAUUGG |
| | UrArArUrUrUrCrUrA | | | | | UCAA (SEQ ID |
| | rCrUrCrUrUrGrUrAr | | | | | NO: 1256) |
| | GrArUrCrCrUrUrGrU | | | | | |
| | rCrArArGrGrCrUrAr | | | | | |
| | UrUrGrGrUrC*mA* | | | | | |
| | mA | | | | | |
| 1103 | mA*mU*rGrUrGrUr | +25 RNA + | 1xPS- | 66 | 21 | CCUUGUCAA |
| | UrUrUrUrGrUrCrArA | 2xPS | OMe | | | GGCUAUUGG |
| | rArArGrArCrCrUrUr | | | | | UCA (SEQ ID |
| | UrUrUrArArUrUrUrC | | | | | NO: 1254) |
| | rUrArCrUrCrUrUrGr | | | | | |
| | UrArGrArUrCrCrUrU | | | | | |
| | rGrUrCrArArGrGrCr | | | | | |
| | UrArUrUrGrGrUrC* | | | | | |
| | mA | | | | | |
| 1104 | mA*mA*rArArArAr | PolyA | 1xPS- | 66 | 21 | CCUUGUCAA |
| | ArArArArArArArArA | RNA + | OMe | | | GGCUAUUGG |
| | rArArArArArArArAr | 2xPS | | | | UCA (SEQ ID |
| | ArArUrArArUrUrUrC | | | | | NO: 1254) |
| | rUrArCrUrCrUrUrGr | | | | | |
| | UrArGrArUrCrCrUrU | | | | | |
| | rGrUrCrArArGrGrCr | | | | | |
| | UrArUrUrGrGrUrC* | | | | | |
| | mA | | | | | |
| 1105 | mU*mU*rUrUrUrUr | PolyU | 1xPS- | 66 | 21 | CCUUGUCAA |
| | UrUrUrUrUrUrUrUrU | RNA + | OMe | | | GGCUAUUGG |
| | rUrUrUrUrUrUrUrUr | 2xPS | | | | UCA (SEQ ID |
| | UrUrUrArArUrUrUrC | | | | | NO: 1254) |
| | rUrArCrUrCrUrUrGr | | | | | |
| | UrArGrArUrCrCrUrU | | | | | |
| | rGrUrCrArArGrGrCr | | | | | |
| | UrArUrUrGrGrUrC* | | | | | |
| | mA | | | | | |

All bases are in upper case
Lowercase “r” represents RNA, 2′-hydroxy; bases not modified by an “r” are DNA
All bases are linked via standard phosphodiester bonds except as noted:
“*” represents phosphorothioate modification
“PS” represents phosphorothioate modification
“PS2” represents phosphorodithioate modification
“OMe” represents a 2′-o-methyl modification
“m” represents a 2′-o-methyl modification
**Table 24 provides a listing of the sequences of the gRNA 5′ extensions

TABLE 31
Sp35 RNP and RNP58 Indels

| | “% in | “% in | | | | |
|---|---|---|---|---|---|---|
| | indel” | indel” | | Genomic | Genomic | HBG1 and |
| | SpCas9 | Cpf1 | | Coordinates | Coordinates | HBG2 |
| Indel_id | (Sp35 RNP) | (RNP58) | MMEJ | at HBG1 | at HBG2 | Position |
| 159_-18_NA | 0.013503714 | 0.185309532 | True | chr11: 5,249,961- | chr11: 5,254,885- | HBG1/2 c. −104 to −121 |
| | | | | 5,249,978 | 5,254,902 | |
| 165_-6_NA | 0.011778239 | 0.050633257 | False | chr11: 5,249,967- | chr11: 5,254,891- | HBG1/2 c. −110 to −115 |
| | | | | 5,249,972 | 5,254,896 | |
| 167_-4_NA | 0.046087674 | 0.049159297 | False | chr11: 5,249,969- | chr11: 5,254,893- | HBG1/2 c. −112 to −115 |
| | | | | 5,249,972 | 5,254,896 | |
| 168_-3_NA | 0.072269874 | 0.044737417 | False | chr11: 5,249,970- | chr11: 5,254,894- | HBG1/2 c. −113 to −115 |
| | | | | 5,249,972 | 5,254,896 | |
| 157_-13_NA | 0.318812673 | 0.033628125 | True | chr11: 5,249,959- | chr11: 5,254,883- | HBG1/2 c. −102 to −114 |
| | | | | 5,249,971 | 5,254,895 | |
| 166_-7_NA | 0.001100303 | 0.027923354 | False | chr11: 5,249,968- | chr11: 5,254,892- | HBG1/2 c. −111 to −117 |
| | | | | 5,249,974 | 5,254,898 | |
| 166_-5_NA | 0.007076946 | 0.025412163 | False | chr11: 5,249,968- | chr11: 5,254,892- | HBG1/2 c. −111 to −115 |
| | | | | 5,249,972 | 5,254,896 | |
| 169_-5_NA | 0.000775213 | 0.024948138 | False | chr11: 5,249,971- | chr11: 5,254,895- | HBG1/2 c. −114 to −118 |
| | | | | 5,249,975 | 5,254,899 | |
| 168_-5_NA | 0.000475131 | 0.018288023 | False | chr11: 5,249,970- | chr11: 5,254,894- | HBG1/2 c. −113 to −117 |
| | | | | 5,249,974 | 5,254,898 | |
| 169_-4_NA | 0.001400385 | 0.017605634 | False | chr11: 5,249,971- | chr11: 5,254,895- | HBG1/2 c. −114 to −117 |
| | | | | 5,249,974 | 5,254,898 | |
| 167_-5_NA | 0.000700193 | 0.014548531 | False | chr11: 5,249,969- | chr11: 5,254,893- | HBG1/2 c. −112 to −116 |
| | | | | 5,249,973 | 5,254,897 | |
| 164_-8_NA | 0.002275626 | 0.01375696 | False | chr11: 5,249,966- | chr11: 5,254,890- | HBG1/2 c. −109 to −116 |
| | | | | 5,249,973 | 5,254,897 | |
| 166_-8_NA | 0.000625172 | 0.011982749 | False | chr11: 5,249,968- | chr11: 5,254,892- | HBG1/2 c. −111 to −118 |
| | | | | 5,249,975 | 5,254,899 | |
| 166_-12_NA | 0.000300083 | 0.01031772 | False | chr11: 5,249,968- | chr11: 5,254,892- | HBG1/2 c. −111 to −122 |
| | | | | 5,249,979 | 5,254,903 | |
| 169_-2_NA | 0.084173148 | 0.010263129 | False | chr11: 5,249,971- | chr11: 5,254,895- | HBG1/2 c. −114 to −115 |
| | | | | 5,249,972 | 5,254,896 | |
| 167_-6_NA | 0.000500138 | 0.008952942 | False | chr11: 5,249,969- | chr11: 5,254,893- | HBG1/2 c. −112 to −117 |
| | | | | 5,249,974 | 5,254,898 | |
| 157_-18_NA | 0.001650454 | 0.008024894 | False | chr11: 5,249,959- | chr11: 5,254,883- | HBG1/2 c. −102 to −119 |
| | | | | 5,249,976 | 5,254,900 | |
| 166_-13_NA | 0.012028308 | 0.006960367 | False | chr11: 5,249,968- | chr11: 5,254,892- | HBG1/2 c. −111 to −123 |
| | | | | 5,249,980 | 5,254,904 | |
| 168_-10_NA | 0.000050014 | 0.006359865 | False | chr11: 5,249,970- | chr11: 5,254,894- | HBG1/2 c. −113 to −122 |
| | | | | 5,249,979 | 5,254,903 | |
| 162_-22_NA | 0.001050289 | 0.006086909 | True | chr11: 5,249,964- | chr11: 5,254,888- | HBG1/2 c. −107 to −128 |
| | | | | 5,249,985 | 5,254,909 | |
| 169_-8_NA | 0.000100028 | 0.00589584 | False | chr11: 5,249,971- | chr11: 5,254,895- | HBG1/2 c. −114 to −121 |
| | | | | 5,249,978 | 5,254,902 | |
| 169_-9_NA | 0.000050014 | 0.005868545 | False | chr11: 5,249,971- | chr11: 5,254,895- | HBG1/2 c. −114 to −122 |
| | | | | 5,249,979 | 5,254,903 | |
| 165_-7_NA | 0.000425117 | 0.005704771 | False | chr11: 5,249,967- | chr11: 5,254,891- | HBG1/2 c. −110 to −116 |
| | | | | 5,249,973 | 5,254,897 | |
| 169_-7_NA | 0.000325089 | 0.005677476 | False | chr11: 5,249,971- | chr11: 5,254,895- | HBG1/2 c. −114 to −120 |
| | | | | 5,249,977 | 5,254,901 | |
| 168_-8_NA | 0.000200055 | 0.005349929 | False | chr11: 5,249,970- | chr11: 5,254,894- | HBG1/2 c. −113 to −120 |
| | | | | 5,249,977 | 5,254,901 | |
| 170_-2_NA | 0.001025282 | 0.00515886 | False | chr11: 5,249,972- | chr11: 5,254,896- | HBG1/2 c. −115 to −116 |
| | | | | 5,249,973 | 5,254,897 | |
| 168_-9_NA | 0 | 0.005022382 | False | chr11: 5,249,970- | chr11: 5,254,894- | HBG1/2 c. −113 to −121 |
| | | | | 5,249,978 | 5,254,902 | |
| 168_-6_NA | 0.000150041 | 0.004967791 | False | chr11: 5,249,970- | chr11: 5,254,894- | HBG1/2 c. −113 to −118 |
| | | | | 5,249,975 | 5,254,899 | |
| 169_-10_NA | 0.000050014 | 0.004858609 | False | chr11: 5,249,971- | chr11: 5,254,895- | HBG1/2 c. −114 to −123 |
| | | | | 5,249,980 | 5,254,904 | |
| 166_-11_NA | 0.000025007 | 0.004749427 | False | chr11: 5,249,968- | chr11: 5,254,892- | HBG1/2 c. −111 to −121 |
| | | | | 5,249,978 | 5,254,902 | |
| 164_-23_NA | 0.000125034 | 0.004722131 | False | chr11: 5,249,966- | chr11: 5,254,890- | HBG1/2 c. −109 to −131 |
| | | | | 5,249,988 | 5,254,912 | |
| 166_-10_NA | 0.000050014 | 0.00417622 | False | chr11: 5,249,968- | chr11: 5,254,892- | HBG1/2 c. −111 to −120 |
| | | | | 5,249,977 | 5,254,901 | |
| 167_-11_NA | 0 | 0.004039742 | False | chr11: 5,249,969- | chr11: 5,254,893- | HBG1/2 c. −112 to −122 |
| | | | | 5,249,979 | 5,254,903 | |
| 168_-7_NA | 0.000125034 | 0.003957856 | False | chr11: 5,249,970- | chr11: 5,254,894- | HBG1/2 c. −113 to −119 |
| | | | | 5,249,976 | 5,254,900 | |
| 168_-11_NA | 0.000125034 | 0.003794082 | False | chr11: 5,249,970- | chr11: 5,254,894- | HBG1/2 c. −113 to −123 |
| | | | | 5,249,980 | 5,254,904 | |
| 166_-9_NA | 0.000025007 | 0.003766787 | False | chr11: 5,249,968- | chr11: 5,254,892- | HBG1/2 c. −111 to −119 |
| | | | | 5,249,976 | 5,254,900 | |
| 167_-1_NA | 0.000975268 | 0.0036849 | False | chr11: 5,249,969- | chr11: 5,254,893- | HBG1/2 c. −112 to −112 |
| | | | | 5,249,969 | 5,254,893 | |
| 168_-2_NA | 0.003325915 | 0.003575718 | False | chr11: 5,249,970- | chr11: 5,254,894- | HBG1/2 c. −113 to −114 |
| | | | | 5,249,971 | 5,254,895 | |
| 167_-9_NA | 0.000075021 | 0.003521127 | False | chr11: 5,249,969- | chr11: 5,254,893- | HBG1/2 c. −112 to −120 |
| | | | | 5,249,977 | 5,254,901 | |
| 168_-12_NA | 0.000200055 | 0.003521127 | False | chr11: 5,249,970- | chr11: 5,254,894- | HBG1/2 c. −113 to −124 |
| | | | | 5,249,981 | 5,254,905 | |
| 166_-15_NA | 0.000050014 | 0.003493831 | False | chr11: 5,249,968- | chr11: 5,254,892- | HBG1/2 c. −111 to −125 |
| | | | | 5,249,982 | 5,254,906 | |
| 162_-7_NA | 0.005901623 | 0.00343924 | True | chr11: 5,249,964- | chr11: 5,254,888- | HBG1/2 c. −107 to −113 |
| | | | | 5,249,970 | 5,254,894 | |
| 169_-12_NA | 0.001775488 | 0.003384649 | False | chr11: 5,249,971- | chr11: 5,254,895- | HBG1/2 c. −114 to −125 |
| | | | | 5,249,982 | 5,254,906 | |
| 168_-13_NA | 0.001000275 | 0.003357353 | False | chr11: 5,249,970- | chr11: 5,254,894- | HBG1/2 c. −113 to −125 |
| | | | | 5,249,982 | 5,254,906 | |
| 166_-4_NA | 0.001000275 | 0.003111693 | False | chr11: 5,249,968- | chr11: 5,254,892- | HBG1/2 c. −111 to −114 |
| | | | | 5,249,971 | 5,254,895 | |
| 167_-10_NA | 0.000050014 | 0.003057102 | False | chr11: 5,249,969- | chr11: 5,254,893- | HBG1/2 c. −112 to −121 |
| | | | | 5,249,978 | 5,254,902 | |
| 169_-13_NA | 0.001500413 | 0.002756851 | False | chr11: 5,249,971- | chr11: 5,254,895- | HBG1/2 c. −114 to −126 |
| | | | | 5,249,983 | 5,254,907 | |
| 157_-19_NA | 0.000075021 | 0.002483896 | False | chr11: 5,249,959- | chr11: 5,254,883- | HBG1/2 c. −102 to −120 |
| | | | | 5,249,977 | 5,254,901 | |
| 166_-14_NA | 0.000025007 | 0.0024566 | False | chr11: 5,249,968- | chr11: 5,254,892- | HBG1/2 c. −111 to −124 |
| | | | | 5,249,981 | 5,254,905 | |
| 158_-14_NA | 0.000050014 | 0.002429305 | False | chr11: 5,249,960- | chr11: 5,254,884- | HBG1/2 c. −103 to −116 |
| | | | | 5,249,973 | 5,254,897 | |
| 167_-3_NA | 0.002700743 | 0.002402009 | False | chr11: 5,249,969- | chr11: 5,254,893- | HBG1/2 c. −112 to −114 |
| | | | | 5,249,971 | 5,254,895 | |
| 163_-9_NA | 0.000200055 | 0.002265531 | False | chr11: 5,249,965- | chr11: 5,254,889- | HBG1/2 c. −108 to −116 |
| | | | | 5,249,973 | 5,254,897 | |
| 162_-8_NA | 0.006076671 | 0.002156349 | False | chr11: 5,249,964- | chr11: 5,254,888- | HBG1/2 c. −107 to −114 |
| | | | | 5,249,971 | 5,254,895 | |
| 168_-14_NA | 0 | 0.002129053 | False | chr11: 5,249,970- | chr11: 5,254,894- | HBG1/2 c. −113 to −126 |
| | | | | 5,249,983 | 5,254,907 | |
| 167_-16_NA | 0.000050014 | 0.00196528 | False | chr11: 5,249,969- | chr11: 5,254,893- | HBG1/2 c. −112 to −127 |
| | | | | 5,249,984 | 5,254,908 | |
| 166_-16_NA | 0 | 0.001910689 | False | chr11: 5,249,968- | chr11: 5,254,892- | HBG1/2 c. −111 to −126 |
| | | | | 5,249,983 | 5,254,907 | |
| 169_-14_NA | 0.000125034 | 0.001910689 | False | chr11: 5,249,971- | chr11: 5,254,895- | HBG1/2 c. −114 to −127 |
| | | | | 5,249,984 | 5,254,908 | |
| 165_-3_NA | 0.000925254 | 0.001883393 | False | chr11: 5,249,967- | chr11: 5,254,891- | HBG1/2 c. −110 to −112 |
| | | | | 5,249,969 | 5,254,893 | |
| 157_-23_NA | 0.000100028 | 0.001856098 | False | chr11: 5,249,959- | chr11: 5,254,883- | HBG1/2 c. −102 to −124 |
| | | | | 5,249,981 | 5,254,905 | |
| 165_-14_NA | 0.000025007 | 0.001856098 | False | chr11: 5,249,967- | chr11: 5,254,891- | HBG1/2 c. −110 to −123 |
| | | | | 5,249,980 | 5,254,904 | |
| 166_-27_NA | 0.000225062 | 0.00171962 | True | chr11: 5,249,968- | chr11: 5,254,892- | HBG1/2 c. −111 to −137 |
| | | | | 5,249,994 | 5,254,918 | |
| 165_-9_NA | 0.000200055 | 0.001692324 | False | chr11: 5,249,967- | chr11: 5,254,891- | HBG1/2 c. −110 to −118 |
| | | | | 5,249,975 | 5,254,899 | |
| 167_-18_NA | 0.000250069 | 0.001665029 | False | chr11: 5,249,969- | chr11: 5,254,893- | HBG1/2 c. −112 to −129 |
| | | | | 5,249,986 | 5,254,910 | |
| 156_-27_NA | 0 | 0.001610438 | True | chr11: 5,249,958- | chr11: 5,254,882- | HBG1/2 c. −101 to −127 |
| | | | | 5,249,984 | 5,254,908 | |
| 165_-2_NA | 0.000425117 | 0.001610438 | False | chr11: 5,249,967- | chr11: 5,254,891- | HBG1/2 c. −110 to −111 |
| | | | | 5,249,968 | 5,254,892 | |
| 150_-21_NA | 0.000225062 | 0.001583142 | False | chr11: 5,249,952- | chr11: 5,254,876- | HBG1/2 c. −95 to −115 |
| | | | | 5,249,972 | 5,254,896 | |
| 152_-24_NA | 0.000225062 | 0.001583142 | True | chr11: 5,249,954- | chr11: 5,254,878- | HBG1/2 c. −97 to −120 |
| | | | | 5,249,977 | 5,254,901 | |
| 165_-12_NA | 0.000225062 | 0.001583142 | False | chr11: 5,249,967- | chr11: 5,254,891- | HBG1/2 c. −110 to −121 |
| | | | | 5,249,978 | 5,254,902 | |
| 167_-2_NA | 0.000850234 | 0.001583142 | False | chr11: 5,249,969- | chr11: 5,254,893- | HBG1/2 c. −112 to −113 |
| | | | | 5,249,970 | 5,254,894 | |
| 164_-9_NA | 0.000150041 | 0.001555847 | False | chr11: 5,249,966- | chr11: 5,254,890- | HBG1/2 c. −109 to −117 |
| | | | | 5,249,974 | 5,254,898 | |
| 165_-11_NA | 0.000025007 | 0.001528551 | False | chr11: 5,249,967- | chr11: 5,254,891- | HBG1/2 c. −110 to −120 |
| | | | | 5,249,977 | 5,254,901 | |
| 159_-28_NA | 0.000125034 | 0.001501256 | True | chr11: 5,249,961- | chr11: 5,254,885- | HBG1/2 c. −104 to −131 |
| | | | | 5,249,988 | 5,254,912 | |
| 169_-6_NA | 0.013753782 | 0.001501256 | True | chr11: 5,249,971- | chr11: 5,254,895- | HBG1/2 c. −114 to −119 |
| | | | | 5,249,976 | 5,254,900 | |
| 160_-12_NA | 0.000050014 | 0.00147396 | False | chr11: 5,249,962- | chr11: 5,254,886- | HBG1/2 c. −105 to −116 |
| | | | | 5,249,973 | 5,254,897 | |
| 145_-32_NA | 0.001125309 | 0.001446664 | True | chr11: 5,249,947- | chr11: 5,254,871- | HBG1/2 c. −90 to −121 |
| | | | | 5,249,978 | 5,254,902 | |
| 169_-1_NA | 0.096276476 | 0.001446664 | False | chr11: 5,249,971- | chr11: 5,254,895- | HBG1/2 c. −114 to −114 |
| | | | | 5,249,971 | 5,254,895 | |
| 163_-10_NA | 0.000125034 | 0.001419369 | False | chr11: 5,249,965- | chr11: 5,254,889- | HBG1/2 c. −108 to −117 |
| | | | | 5,249,974 | 5,254,898 | |
| 152_-33_NA | 0.000200055 | 0.001392073 | True | chr11: 5,249,954- | chr11: 5,254,878- | HBG1/2 c. −97 to −129 |
| | | | | 5,249,986 | 5,254,910 | |
| 156_-15_NA | 0.000750206 | 0.001392073 | False | chr11: 5,249,958- | chr11: 5,254,882- | HBG1/2 c. −101 to −115 |
| | | | | 5,249,972 | 5,254,896 | |
| 167_-14_NA | 0.000075021 | 0.001337482 | False | chr11: 5,249,969- | chr11: 5,254,893- | HBG1/2 c. −112 to −125 |
| | | | | 5,249,982 | 5,254,906 | |
| 158_-16_NA | 0 | 0.001310187 | False | chr11: 5,249,960- | chr11: 5,254,884- | HBG1/2 c. −103 to −118 |
| | | | | 5,249,975 | 5,254,899 | |
| 162_-9_NA | 0.002200605 | 0.001310187 | False | chr11: 5,249,964- | chr11: 5,254,888- | HBG1/2 c. −107 to −115 |
| | | | | 5,249,972 | 5,254,896 | |
| 164_-10_NA | 0.000325089 | 0.001310187 | False | chr11: 5,249,966- | chr11: 5,254,890- | HBG1/2 c. −109 to −118 |
| | | | | 5,249,975 | 5,254,899 | |
| 165_-5_NA | 0.001975543 | 0.001310187 | False | chr11: 5,249,967- | chr11: 5,254,891- | HBG1/2 c. −110 to −114 |
| | | | | 5,249,971 | 5,254,895 | |
| 169_-11_NA | 0.015704319 | 0.001310187 | True | chr11: 5,249,971- | chr11: 5,254,895- | HBG1/2 c. −114 to −124 |
| | | | | 5,249,981 | 5,254,905 | |
| 170_-4_NA | 0.00040011 | 0.001310187 | False | chr11: 5,249,972- | chr11: 5,254,896- | HBG1/2 c. −115 to −118 |
| | | | | 5,249,975 | 5,254,899 | |
| 152_-29_NA | 0.000450124 | 0.001282891 | True | chr11: 5,249,954- | chr11: 5,254,878- | HBG1/2 c. −97 to −125 |
| | | | | 5,249,982 | 5,254,906 | |
| 161_-11_NA | 0 | 0.0012283 | False | chr11: 5,249,963- | chr11: 5,254,887- | HBG1/2 c. −106 to −116 |
| | | | | 5,249,973 | 5,254,897 | |
| 169_-18_NA | 0.000100028 | 0.0012283 | False | chr11: 5,249,971- | chr11: 5,254,895- | HBG1/2 c. −114 to −131 |
| | | | | 5,249,988 | 5,254,912 | |
| 164_-27_NA | 0.000275076 | 0.001201004 | False | chr11: 5,249,966- | chr11: 5,254,890- | HBG1/2 c. −109 to −135 |
| | | | | 5,249,992 | 5,254,916 | |
| 168_-18_NA | 0.000100028 | 0.001201004 | False | chr11: 5,249,970- | chr11: 5,254,894- | HBG1/2 c. −113 to −130 |
| | | | | 5,249,987 | 5,254,911 | |
| 168_-23_NA | 0 | 0.001201004 | False | chr11: 5,249,970- | chr11: 5,254,894- | HBG1/2 c. −113 to −135 |
| | | | | 5,249,992 | 5,254,916 | |
| 150_-33_NA | 0.000150041 | 0.001173709 | False | chr11: 5,249,952- | chr11: 5,254,876- | HBG1/2 c. −95 to −127 |
| | | | | 5,249,984 | 5,254,908 | |
| 151_-20_NA | 0.000225062 | 0.001173709 | False | chr11: 5,249,953- | chr11: 5,254,877- | HBG1/2 c. −96 to −115 |
| | | | | 5,249,972 | 5,254,896 | |
| 169_-22_NA | 0.000025007 | 0.001173709 | False | chr11: 5,249,971- | chr11: 5,254,895- | HBG1/2 c. −114 to −135 |
| | | | | 5,249,992 | 5,254,916 | |
| 162_-14_NA | 0.000125034 | 0.001146413 | False | chr11: 5,249,964- | chr11: 5,254,888- | HBG1/2 c. −107 to −120 |
| | | | | 5,249,977 | 5,254,901 | |
| 166_-21_NA | 0.000025007 | 0.001146413 | False | chr11: 5,249,968- | chr11: 5,254,892- | HBG1/2 c. −111 to −131 |
| | | | | 5,249,988 | 5,254,912 | |
| 160_-11_NA | 0.001675461 | 0.001119118 | False | chr11: 5,249,962- | chr11: 5,254,886- | HBG1/2 c. −105 to −115 |
| | | | | 5,249,972 | 5,254,896 | |
| 155_-16_NA | 0.000350096 | 0.001091822 | False | chr11: 5,249,957- | chr11: 5,254,881- | HBG1/2 c. −100 to −115 |
| | | | | 5,249,972 | 5,254,896 | |
| 166_-26_NA | 0 | 0.001091822 | False | chr11: 5,249,968- | chr11: 5,254,892- | HBG1/2 c. −111 to −136 |
| | | | | 5,249,993 | 5,254,917 | |
| 157_-24_NA | 0.000125034 | 0.001064527 | False | chr11: 5,249,959- | chr11: 5,254,883- | HBG1/2 c. −102 to −125 |
| | | | | 5,249,982 | 5,254,906 | |
| 165_-15_NA | 0.000050014 | 0.001064527 | False | chr11: 5,249,967- | chr11: 5,254,891- | HBG1/2 c. −110 to −124 |
| | | | | 5,249,981 | 5,254,905 | |
| 162_-33_NA | 0.000025007 | 0.001037231 | True | chr11: 5,249,964- | chr11: 5,254,888- | HBG1/2 c. −107 to −139 |
| | | | | 5,249,996 | 5,254,920 | |
| 163_-12_NA | 0.000100028 | 0.001037231 | False | chr11: 5,249,965- | chr11: 5,254,889- | HBG1/2 c. −108 to −119 |
| | | | | 5,249,976 | 5,254,900 | |
| 163_-6_NA | 0.001050289 | 0.001009936 | False | chr11: 5,249,965- | chr11: 5,254,889- | HBG1/2 c. −108 to −113 |
| | | | | 5,249,970 | 5,254,894 | |
| 164_-28_NA | 0.000175048 | 0.001009936 | False | chr11: 5,249,966- | chr11: 5,254,890- | HBG1/2 c. −109 to −136 |
| | | | | 5,249,993 | 5,254,917 | |
| 155_-12_NA | 0.001150316 | 0.000928049 | True | chr11: 5,249,957- | chr11: 5,254,881- | HBG1/2 c. −100 to −111 |
| | | | | 5,249,968 | 5,254,892 | |
| 137_-27_NA | 0.003901073 | 0.000846162 | True | chr11: 5,249,939- | chr11: 5,254,863- | HBG1/2 c. −82 to −108 |
| | | | | 5,249,965 | 5,254,889 | |
| 161_-10_NA | 0.001625447 | 0.000655093 | False | chr11: 5,249,963- | chr11: 5,254,887- | HBG1/2 c. −106 to −115 |
| | | | | 5,249,972 | 5,254,896 | |
| 170_-10_NA | 0.001050289 | 0.000545911 | False | chr11: 5,249,972- | chr11: 5,254,896- | HBG1/2 c. −115 to −124 |
| | | | | 5,249,981 | 5,254,905 | |
| 171_-1_NA | 0.018029958 | 0.000464024 | False | chr11: 5,249,973- | chr11: 5,254,897- | HBG1/2 c. −116 to −116 |
| | | | | 5,249,973 | 5,254,897 | |
| 154_-18_NA | 0.001325364 | 0.000327547 | False | chr11: 5,249,956- | chr11: 5,254,880- | HBG1/2 c. −99 to −116 |
| | | | | 5,249,973 | 5,254,897 | |
| 168_-15_NA | 0.007727125 | 0.000300251 | True | chr11: 5,249,970- | chr11: 5,254,894- | HBG1/2 c. −113 to −127 |
| | | | | 5,249,984 | 5,254,908 | |
| 171_-2_NA | 0.003325915 | 0.000191069 | False | chr11: 5,249,973- | chr11: 5,254,897- | HBG1/2 c. −116 to −117 |
| | | | | 5,249,974 | 5,254,898 | |
| 170_1_A | 0.001025282 | 0.000163773 | False | chr11: 5,249,972- | chr11: 5,254,896- | HBG1/2 c. −115 to −113 |
| | | | | 5,249,970 | 5,254,894 | |
| 171_1_C | 0.007877166 | 0.000054591 | False | chr11: 5,249,973- | chr11: 5,254,897- | HBG1/2 c. −116 to −114 |
| | | | | 5,249,971 | 5,254,895 | |
| 169_2_GG | 0.004901348 | 0.000027296 | False | chr11: 5,249,971- | chr11: 5,254,895- | HBG1/2 c. −114 to −111 |
| | | | | 5,249,968 | 5,254,892 | |
| 169_1_G | 0.033684263 | 0 | False | chr11: 5,249,971- | chr11: 5,254,895- | HBG1/2 c. −114 to −112 |
| | | | | 5,249,969 | 5,254,893 | |
| 170_4_CCTT | 0.003876066 | 0 | False | chr11: 5,249,972- | chr11: 5,254,896- | HBG1/2 c. −115 to −110 |
| | | | | 5,249,967 | 5,254,891 | |
| 170_4_GCTT | 0.001450399 | 0 | False | chr11: 5,249,972- | chr11: 5,254,896- | HBG1/2 c. −115 to −110 |
| | | | | 5,249,967 | 5,254,891 | |
| 170_5_GCCTT | 0.001175323 | 0 | False | chr11: 5,249,972- | chr11: 5,254,896- | HBG1/2 c. −115 to −109 |
| | | | | 5,249,966 | 5,254,890 | |
| 170_-301_NA | 0.001225337 | 0 | True | chr11: 5,249,972- | chr11: 5,254,896- | HBG1/2 c. −115 to −415 |
| | | | | 5,250,272 | 5,255,196 | |
| 171_1_A | 0.005251444 | 0 | False | chr11: 5,249,973- | chr11: 5,254,897- | HBG1/2 c. −116 to −114 |
| | | | | 5,249,971 | 5,254,895 | |
| 171_1_T | 0.027407537 | 0 | False | chr11: 5,249,973- | chr11: 5,254,897- | HBG1/2 c. −116 to −114 |
| | | | | 5,249,971 | 5,254,895 | |
| 171_2_CC | 0.007151967 | 0 | False | chr11: 5,249,973- | chr11: 5,254,897- | HBG1/2 c. −116 to −113 |
| | | | | 5,249,970 | 5,254,894 | |
| 171_2_CT | 0.002650729 | 0 | False | chr11: 5,249,973- | chr11: 5,254,897- | HBG1/2 c. −116 to −113 |
| | | | | 5,249,970 | 5,254,894 | |
| 171_2_GA | 0.001050289 | 0 | False | chr11: 5,249,973- | chr11: 5,254,897- | HBG1/2 c. −116 to −113 |
| | | | | 5,249,970 | 5,254,894 | |
| 171_2_TC | 0.003275901 | 0 | False | chr11: 5,249,973- | chr11: 5,254,897- | HBG1/2 c. −116 to −113 |
| | | | | 5,249,970 | 5,254,894 | |
| 171_2_TT | 0.002025557 | 0 | False | chr11: 5,249,973- | chr11: 5,254,897- | HBG1/2 c. −116 to −113 |
| | | | | 5,249,970 | 5,254,894 | |
| 171_3_CCC | 0.001125309 | 0 | False | chr11: 5,249,973- | chr11: 5,254,897- | HBG1/2 c. −116 to −112 |
| | | | | 5,249,969 | 5,254,893 | |

The Indel_id is a string identifying the indel, shown as indel_start_position +_+ indel_length +_+ ID. Where ID is NA for deletions and for insertions is the sequence inserted. Positive values indicate insertions and negative values indicate deletions.
The “% in indel” is the percentage of each indel_ID amongst all indels detected in a sample.
In the column labeled MMEJ, “True” indicates the repair was mediated via MMEJ, and “False” indicates the repair was mediated via NHEJ.
The genomic coordinates at HBG1 or HBG2 are reported using the One-based coordinate system, “Homo sapiens chromosome 11, GRCh38.p12 Primary Assembly,” (Version NC_000011.10), NCBI Reference Sequence NC_000011.
The HBG1/2 position indicates the deletion relative to the TSS.

TABLE 32
RNP32 INDELS

| | | | | | Genomic | Genomic | |
|---|---|---|---|---|---|---|---|
| | Ave % | | Cum. | | Coordinates | Coordinates | HBG1/2 |
| Indel Id | in Indel | Cts | Sum | MMEJ | at HBG1 | at HBG2 | position |
| 159_-18_NA | 15.15% | 14 | 15.15% | True | chr11: 5,249,961- | chr11: 5,254,885- | HBG1/2 c. −104 to −121 |
| | | | | | 5,249,978 | 5,254,902 | |
| 165_-6_NA | 5.92% | 14 | 21.07% | False | chr11: 5,249,967- | chr11: 5,254,891- | HBG1/2 c. −110 to −115 |
| | | | | | 5,249,972 | 5,254,896 | |
| 167_-4_NA | 5.53% | 14 | 26.60% | False | chr11: 5,249,969- | chr11: 5,254,893- | HBG1/2 c. −112 to −115 |
| | | | | | 5,249,972 | 5,254,896 | |
| 168_-3_NA | 4.18% | 14 | 30.78% | False | chr11: 5,249,970- | chr11: 5,254,894- | HBG1/2 c. −113 to −115 |
| | | | | | 5,249,972 | 5,254,896 | |
| 166_-5_NA | 3.19% | 14 | 33.97% | False | chr11: 5,249,968- | chr11: 5,254,892- | HBG1/2 c. −111 to −115 |
| | | | | | 5,249,972 | 5,254,896 | |
| 166_-7_NA | 3.10% | 14 | 37.07% | False | chr11: 5,249,968- | chr11: 5,254,892- | HBG1/2 c. −111 to −117 |
| | | | | | 5,249,974 | 5,254,898 | |
| 157_-13_NA | 2.63% | 14 | 39.70% | True | chr11: 5,249,959- | chr11: 5,254,883- | HBG1/2 c. −102 to −114 |
| | | | | | 5,249,971 | 5,254,895 | |
| 169_-5_NA | 2.07% | 14 | 41.77% | False | chr11: 5,249,971- | chr11: 5,254,895- | HBG1/2 c. −114 to −118 |
| | | | | | 5,249,975 | 5,254,899 | |
| 167_-5_NA | 1.72% | 14 | 43.49% | False | chr11: 5,249,969- | chr11: 5,254,893- | HBG1/2 c. −112 to −116 |
| | | | | | 5,249,973 | 5,254,897 | |
| 168_-5_NA | 1.54% | 14 | 45.03% | False | chr11: 5,249,970- | chr11: 5,254,894- | HBG1/2 c. −113 to −117 |
| | | | | | 5,249,974 | 5,254,898 | |
| 169_-4_NA | 1.43% | 14 | 46.46% | False | chr11: 5,249,971- | chr11: 5,254,895- | HBG1/2 c. −114 to −117 |
| | | | | | 5,249,974 | 5,254,898 | |
| 166_-8_NA | 1.41% | 14 | 47.88% | False | chr11: 5,249,968- | chr11: 5,254,892- | HBG1/2 c. −111 to −118 |
| | | | | | 5,249,975 | 5,254,899 | |
| 164_-8_NA | 1.32% | 14 | 49.20% | False | chr11: 5,249,966- | chr11: 5,254,890- | HBG1/2 c. −109 to −116 |
| | | | | | 5,249,973 | 5,254,897 | |
| 166_-12_NA | 1.28% | 14 | 50.48% | False | chr11: 5,249,968- | chr11: 5,254,892- | HBG1/2 c. −111 to −122 |
| | | | | | 5,249,979 | 5,254,903 | |
| 166_-13_NA | 1.10% | 14 | 51.58% | False | chr11: 5,249,968- | chr11: 5,254,892- | HBG1/2 c. −111 to −123 |
| | | | | | 5,249,980 | 5,254,904 | |
| 167_-6_NA | 0.90% | 14 | 52.47% | False | chr11: 5,249,969- | chr11: 5,254,893- | HBG1/2 c. −112 to −117 |
| | | | | | 5,249,974 | 5,254,898 | |
| 169_-2_NA | 0.83% | 14 | 53.30% | False | chr11: 5,249,971- | chr11: 5,254,895- | HBG1/2 c. −114 to −115 |
| | | | | | 5,249,972 | 5,254,896 | |
| 168_-6_NA | 0.80% | 14 | 54.10% | False | chr11: 5,249,970- | chr11: 5,254,894- | HBG1/2 c. −113 to −118 |
| | | | | | 5,249,975 | 5,254,899 | |
| 166_-10_NA | 0.72% | 14 | 54.82% | False | chr11: 5,249,968- | chr11: 5,254,892- | HBG1/2 c. −111 to −120 |
| | | | | | 5,249,977 | 5,254,901 | |
| 169_-9_NA | 0.69% | 14 | 55.51% | False | chr11: 5,249,971- | chr11: 5,254,895- | HBG1/2 c. −114 to −122 |
| | | | | | 5,249,979 | 5,254,903 | |
| 168_-8_NA | 0.65% | 14 | 56.16% | False | chr11: 5,249,970- | chr11: 5,254,894- | HBG1/2 c. −113 to −120 |
| | | | | | 5,249,977 | 5,254,901 | |
| 169_-8_NA | 0.65% | 14 | 56.80% | False | chr11: 5,249,971- | chr11: 5,254,895- | HBG1/2 c. −114 to −121 |
| | | | | | 5,249,978 | 5,254,902 | |
| 168_-7_NA | 0.59% | 14 | 57.39% | False | chr11: 5,249,970- | chr11: 5,254,894- | HBG1/2 c. −113 to −119 |
| | | | | | 5,249,976 | 5,254,900 | |
| 165_-7_NA | 0.57% | 14 | 57.97% | False | chr11: 5,249,967- | chr11: 5,254,891- | HBG1/2 c. −110 to −116 |
| | | | | | 5,249,973 | 5,254,897 | |
| 169_-7_NA | 0.57% | 14 | 58.54% | False | chr11: 5,249,971- | chr11: 5,254,895- | HBG1/2 c. −114 to −120 |
| | | | | | 5,249,977 | 5,254,901 | |
| 157_-18_NA | 0.55% | 14 | 59.10% | False | chr11: 5,249,959- | chr11: 5,254,883- | HBG1/2 c. −102 to −119 |
| | | | | | 5,249,976 | 5,254,900 | |
| 168_-10_NA | 0.55% | 14 | 59.64% | False | chr11: 5,249,970- | chr11: 5,254,894- | HBG1/2 c. −113 to −122 |
| | | | | | 5,249,979 | 5,254,903 | |
| 169_-10_NA | 0.52% | 14 | 60.16% | False | chr11: 5,249,971- | chr11: 5,254,895- | HBG1/2 c. −114 to −123 |
| | | | | | 5,249,980 | 5,254,904 | |
| 168_-13_NA | 0.52% | 14 | 60.68% | False | chr11: 5,249,970- | chr11: 5,254,894- | HBG1/2 c. −113 to −125 |
| | | | | | 5,249,982 | 5,254,906 | |
| 168_-9_NA | 0.49% | 14 | 61.17% | False | chr11: 5,249,970- | chr11: 5,254,894- | HBG1/2 c. −113 to −121 |
| | | | | | 5,249,978 | 5,254,902 | |
| 162_-22_NA | 0.49% | 14 | 61.65% | True | chr11: 5,249,964- | chr11: 5,254,888- | HBG1/2 c. −107 to −128 |
| | | | | | 5,249,985 | 5,254,909 | |
| 166_-11_NA | 0.48% | 14 | 62.13% | False | chr11: 5,249,968- | chr11: 5,254,892- | HBG1/2 c. −111 to −121 |
| | | | | | 5,249,978 | 5,254,902 | |
| 169_-6_NA | 0.46% | 14 | 62.59% | True | chr11: 5,249,971- | chr11: 5,254,895- | HBG1/2 c. −114 to −119 |
| | | | | | 5,249,976 | 5,254,900 | |
| 168_-12_NA | 0.46% | 14 | 63.06% | False | chr11: 5,249,970- | chr11: 5,254,894- | HBG1/2 c. −113 to −124 |
| | | | | | 5,249,981 | 5,254,905 | |
| 166_-15_NA | 0.43% | 14 | 63.49% | False | chr11: 5,249,968- | chr11: 5,254,892- | HBG1/2 c. −111 to −125 |
| | | | | | 5,249,982 | 5,254,906 | |
| 167_-16_NA | 0.43% | 14 | 63.92% | False | chr11: 5,249,969- | chr11: 5,254,893- | HBG1/2 c. −112 to −127 |
| | | | | | 5,249,984 | 5,254,908 | |
| 166_-4_NA | 0.42% | 14 | 64.35% | False | chr11: 5,249,968- | chr11: 5,254,892- | HBG1/2 c. −111 to −114 |
| | | | | | 5,249,971 | 5,254,895 | |
| 167_-11_NA | 0.42% | 14 | 64.77% | False | chr11: 5,249,969- | chr11: 5,254,893- | HBG1/2 c. −112 to −122 |
| | | | | | 5,249,979 | 5,254,903 | |
| 162_-7_NA | 0.42% | 14 | 65.19% | True | chr11: 5,249,964- | chr11: 5,254,888- | HBG1/2 c. −107 to −113 |
| | | | | | 5,249,970 | 5,254,894 | |
| 170_-2_NA | 0.42% | 14 | 65.60% | False | chr11: 5,249,972- | chr11: 5,254,896- | HBG1/2 c. −115 to −116 |
| | | | | | 5,249,973 | 5,254,897 | |
| 168_-11_NA | 0.40% | 14 | 66.00% | False | chr11: 5,249,970- | chr11: 5,254,894- | HBG1/2 c. −113 to −123 |
| | | | | | 5,249,980 | 5,254,904 | |
| 167_-1_NA | 0.37% | 14 | 66.37% | False | chr11: 5,249,969- | chr11: 5,254,893- | HBG1/2 c. −112 to −112 |
| | | | | | 5,249,969 | 5,254,893 | |
| 166_-9_NA | 0.33% | 14 | 66.71% | False | chr11: 5,249,968- | chr11: 5,254,892- | HBG1/2 c. −111 to −119 |
| | | | | | 5,249,976 | 5,254,900 | |
| 167_-10_NA | 0.32% | 14 | 67.03% | False | chr11: 5,249,969- | chr11: 5,254,893- | HBG1/2 c. −112 to −121 |
| | | | | | 5,249,978 | 5,254,902 | |
| 166_-14_NA | 0.32% | 14 | 67.35% | False | chr11: 5,249,968- | chr11: 5,254,892- | HBG1/2 c. −111 to −124 |
| | | | | | 5,249,981 | 5,254,905 | |
| 167_-9_NA | 0.30% | 14 | 67.65% | False | chr11: 5,249,969- | chr11: 5,254,893- | HBG1/2 c. −112 to −120 |
| | | | | | 5,249,977 | 5,254,901 | |
| 168_-2_NA | 0.29% | 14 | 67.94% | False | chr11: 5,249,970- | chr11: 5,254,894- | HBG1/2 c. −113 to −114 |
| | | | | | 5,249,971 | 5,254,895 | |
| 169_-12_NA | 0.28% | 14 | 68.22% | False | chr11: 5,249,971- | chr11: 5,254,895- | HBG1/2 c. −114 to −125 |
| | | | | | 5,249,982 | 5,254,906 | |
| 169_-13_NA | 0.27% | 14 | 68.49% | False | chr11: 5,249,971- | chr11: 5,254,895- | HBG1/2 c. −114 to −126 |
| | | | | | 5,249,983 | 5,254,907 | |
| 169_-11_NA | 0.26% | 14 | 68.74% | True | chr11: 5,249,971- | chr11: 5,254,895- | HBG1/2 c. −114 to −124 |
| | | | | | 5,249,981 | 5,254,905 | |
| 165_-9_NA | 0.24% | 14 | 68.99% | False | chr11: 5,249,967- | chr11: 5,254,891- | HBG1/2 c. −110 to −118 |
| | | | | | 5,249,975 | 5,254,899 | |
| 167_-3_NA | 0.23% | 14 | 69.22% | False | chr11: 5,249,969- | chr11: 5,254,893- | HBG1/2 c. −112 to −114 |
| | | | | | 5,249,971 | 5,254,895 | |
| 163_-9_NA | 0.23% | 14 | 69.45% | False | chr11: 5,249,965- | chr11: 5,254,889- | HBG1/2 c. −108 to −116 |
| | | | | | 5,249,973 | 5,254,897 | |
| 167_-14_NA | 0.23% | 14 | 69.68% | False | chr11: 5,249,969- | chr11: 5,254,893- | HBG1/2 c. −112 to −125 |
| | | | | | 5,249,982 | 5,254,906 | |
| 152_-24_NA | 0.22% | 14 | 69.90% | True | chr11: 5,249,954- | chr11: 5,254,878- | HBG1/2 c. −97 to −120 |
| | | | | | 5,249,977 | 5,254,901 | |
| 157_-19_NA | 0.22% | 13 | 70.12% | False | chr11: 5,249,959- | chr11: 5,254,883- | HBG1/2 c. −102 to −120 |
| | | | | | 5,249,977 | 5,254,901 | |
| 163_-12_NA | 0.20% | 14 | 70.32% | False | chr11: 5,249,965- | chr11: 5,254,889- | HBG1/2 c. −108 to −119 |
| | | | | | 5,249,976 | 5,254,900 | |
| 166_-16_NA | 0.20% | 14 | 70.52% | False | chr11: 5,249,968- | chr11: 5,254,892- | HBG1/2 c. −111 to −126 |
| | | | | | 5,249,983 | 5,254,907 | |
| 162_-10_NA | 0.19% | 13 | 70.72% | False | chr11: 5,249,964- | chr11: 5,254,888- | HBG1/2 c. −107 to −116 |
| | | | | | 5,249,973 | 5,254,897 | |
| 158_-14_NA | 0.19% | 13 | 70.91% | False | chr11: 5,249,960- | chr11: 5,254,884- | HBG1/2 c. −103 to −116 |
| | | | | | 5,249,973 | 5,254,897 | |
| 159_-28_NA | 0.19% | 14 | 71.10% | True | chr11: 5,249,961- | chr11: 5,254,885- | HBG1/2 c. −104 to −131 |
| | | | | | 5,249,988 | 5,254,912 | |
| 162_-8_NA | 0.19% | 14 | 71.28% | False | chr11: 5,249,964- | chr11: 5,254,888- | HBG1/2 c. −107 to −114 |
| | | | | | 5,249,971 | 5,254,895 | |
| 165_-2_NA | 0.19% | 14 | 71.47% | False | chr11: 5,249,967- | chr11: 5,254,891- | HBG1/2 c. −110 to −111 |
| | | | | | 5,249,968 | 5,254,892 | |
| 152_-33_NA | 0.19% | 14 | 71.65% | True | chr11: 5,249,954- | chr11: 5,254,878- | HBG1/2 c. −97 to −129 |
| | | | | | 5,249,986 | 5,254,910 | |
| 168_-14_NA | 0.18% | 14 | 71.84% | False | chr11: 5,249,970- | chr11: 5,254,894- | HBG1/2 c. −113 to −126 |
| | | | | | 5,249,983 | 5,254,907 | |
| 161_-12_NA | 0.18% | 13 | 72.02% | False | chr11: 5,249,963- | chr11: 5,254,887- | HBG1/2 c. −106 to −117 |
| | | | | | 5,249,974 | 5,254,898 | |
| 170_-4_NA | 0.18% | 14 | 72.20% | False | chr11: 5,249,972- | chr11: 5,254,896- | HBG1/2 c. −115 to −118 |
| | | | | | 5,249,975 | 5,254,899 | |
| 162_-9_NA | 0.18% | 13 | 72.37% | False | chr11: 5,249,964- | chr11: 5,254,888- | HBG1/2 c. −107 to −115 |
| | | | | | 5,249,972 | 5,254,896 | |
| 164_-23_NA | 0.18% | 13 | 72.55% | False | chr11: 5,249,966- | chr11: 5,254,890- | HBG1/2 c. −109 to −131 |
| | | | | | 5,249,988 | 5,254,912 | |
| 164_-10_NA | 0.18% | 14 | 72.73% | False | chr11: 5,249,966- | chr11: 5,254,890- | HBG1/2 c. −109 to −118 |
| | | | | | 5,249,975 | 5,254,899 | |
| 166_-27_NA | 0.17% | 14 | 72.90% | True | chr11: 5,249,968- | chr11: 5,254,892- | HBG1/2 c. −111 to −137 |
| | | | | | 5,249,994 | 5,254,918 | |
| 160_-12_NA | 0.16% | 14 | 73.06% | False | chr11: 5,249,962- | chr11: 5,254,886- | HBG1/2 c. −105 to −116 |
| | | | | | 5,249,973 | 5,254,897 | |
| 165_-12_NA | 0.16% | 14 | 73.22% | False | chr11: 5,249,967- | chr11: 5,254,891- | HBG1/2 c. −110 to −121 |
| | | | | | 5,249,978 | 5,254,902 | |
| 170_-5_NA | 0.16% | 14 | 73.38% | False | chr11: 5,249,972- | chr11: 5,254,896- | HBG1/2 c. −115 to −119 |
| | | | | | 5,249,976 | 5,254,900 | |
| 165_-11_NA | 0.16% | 14 | 73.54% | False | chr11: 5,249,967- | chr11: 5,254,891- | HBG1/2 c. −110 to −120 |
| | | | | | 5,249,977 | 5,254,901 | |
| 137_-27_NA | 0.15% | 14 | 73.69% | True | chr11: 5,249,939- | chr11: 5,254,863- | HBG1/2 c. −82 to −108 |
| | | | | | 5,249,965 | 5,254,889 | |
| 165_-3_NA | 0.15% | 14 | 73.84% | False | chr11: 5,249,967- | chr11: 5,254,891- | HBG1/2 c. −110 to −112 |
| | | | | | 5,249,969 | 5,254,893 | |
| 169_-14_NA | 0.15% | 14 | 73.99% | False | chr11: 5,249,971- | chr11: 5,254,895- | HBG1/2 c. −114 to −127 |
| | | | | | 5,249,984 | 5,254,908 | |
| 172_-5_NA | 0.15% | 14 | 74.14% | True | chr11: 5,249,974- | chr11: 5,254,898- | HBG1/2 c. −117 to −121 |
| | | | | | 5,249,978 | 5,254,902 | |
| 164_-9_NA | 0.15% | 14 | 74.29% | False | chr11: 5,249,966- | chr11: 5,254,890- | HBG1/2 c. −109 to −117 |
| | | | | | 5,249,974 | 5,254,898 | |
| 152_-29_NA | 0.14% | 13 | 74.44% | True | chr11: 5,249,954- | chr11: 5,254,878- | HBG1/2 c. −97 to −125 |
| | | | | | 5,249,982 | 5,254,906 | |
| 166_-22_NA | 0.14% | 14 | 74.58% | False | chr11: 5,249,968- | chr11: 5,254,892- | HBG1/2 c. −111 to −132 |
| | | | | | 5,249,989 | 5,254,913 | |
| 169_-1_NA | 0.14% | 14 | 74.72% | False | chr11: 5,249,971- | chr11: 5,254,895- | HBG1/2 c. −114 to −114 |
| | | | | | 5,249,971 | 5,254,895 | |
| 161_-17_NA | 0.13% | 14 | 74.85% | False | chr11: 5,249,963- | chr11: 5,254,887- | HBG1/2 c. −106 to −122 |
| | | | | | 5,249,979 | 5,254,903 | |
| 162_-14_NA | 0.13% | 14 | 74.98% | False | chr11: 5,249,964- | chr11: 5,254,888- | HBG1/2 c. −107 to −120 |
| | | | | | 5,249,977 | 5,254,901 | |
| 153_-19_NA | 0.13% | 14 | 75.11% | False | chr11: 5,249,955- | chr11: 5,254,879- | HBG1/2 c. −98 to −116 |
| | | | | | 5,249,973 | 5,254,897 | |
| 151_-20_NA | 0.13% | 14 | 75.23% | False | chr11: 5,249,953- | chr11: 5,254,877- | HBG1/2 c. −96 to −115 |
| | | | | | 5,249,972 | 5,254,896 | |
| 161_-11_NA | 0.13% | 13 | 75.36% | False | chr11: 5,249,963- | chr11: 5,254,887- | HBG1/2 c. −106 to −116 |
| | | | | | 5,249,973 | 5,254,897 | |
| 165_-5_NA | 0.13% | 14 | 75.49% | False | chr11: 5,249,967- | chr11: 5,254,891- | HBG1/2 c. −110 to −114 |
| | | | | | 5,249,971 | 5,254,895 | |
| 156_-15_NA | 0.12% | 14 | 75.61% | False | chr11: 5,249,958- | chr11: 5,254,882- | HBG1/2 c. −101 to −115 |
| | | | | | 5,249,972 | 5,254,896 | |
| 167_-2_NA | 0.12% | 14 | 75.73% | False | chr11: 5,249,969- | chr11: 5,254,893- | HBG1/2 c. −112 to −113 |
| | | | | | 5,249,970 | 5,254,894 | |
| 167_-18_NA | 0.12% | 14 | 75.86% | False | chr11: 5,249,969- | chr11: 5,254,893- | HBG1/2 c. −112 to −129 |
| | | | | | 5,249,986 | 5,254,910 | |
| 145_-32_NA | 0.12% | 13 | 75.98% | True | chr11: 5,249,947- | chr11: 5,254,871- | HBG1/2 c. −90 to −121 |
| | | | | | 5,249,978 | 5,254,902 | |
| 166_-21_NA | 0.12% | 14 | 76.10% | False | chr11: 5,249,968- | chr11: 5,254,892- | HBG1/2 c. −111 to −131 |
| | | | | | 5,249,988 | 5,254,912 | |
| 169_-18_NA | 0.12% | 14 | 76.22% | False | chr11: 5,249,971- | chr11: 5,254,895- | HBG1/2 c. −114 to −131 |
| | | | | | 5,249,988 | 5,254,912 | |
| 153_-38_NA | 0.12% | 13 | 76.34% | True | chr11: 5,249,955- | chr11: 5,254,879- | HBG1/2 c. −98 to −135 |
| | | | | | 5,249,992 | 5,254,916 | |
| 163_-17_NA | 0.12% | 14 | 76.46% | False | chr11: 5,249,965- | chr11: 5,254,889- | HBG1/2 c. −108 to −124 |
| | | | | | 5,249,981 | 5,254,905 | |
| 165_-14_NA | 0.12% | 14 | 76.58% | False | chr11: 5,249,967- | chr11: 5,254,891- | HBG1/2 c. −110 to −123 |
| | | | | | 5,249,980 | 5,254,904 | |
| 165_-15_NA | 0.12% | 14 | 76.70% | False | chr11: 5,249,967- | chr11: 5,254,891- | HBG1/2 c. −110 to −124 |
| | | | | | 5,249,981 | 5,254,905 | |
| 160_-14_NA | 0.12% | 13 | 76.81% | False | chr11: 5,249,962- | chr11: 5,254,886- | HBG1/2 c. −105 to −118 |
| | | | | | 5,249,975 | 5,254,899 | |
| 166_-25_NA | 0.11% | 13 | 76.93% | False | chr11: 5,249,968- | chr11: 5,254,892- | HBG1/2 c. −111 to −135 |
| | | | | | 5,249,992 | 5,254,916 | |
| 170_-9_NA | 0.11% | 14 | 77.04% | False | chr11: 5,249,972- | chr11: 5,254,896- | HBG1/2 c. −115 to −123 |
| | | | | | 5,249,980 | 5,254,904 | |
| 152_-18_NA | 0.11% | 14 | 77.15% | False | chr11: 5,249,954- | chr11: 5,254,878- | HBG1/2 c. −97 to −114 |
| | | | | | 5,249,971 | 5,254,895 | |
| 168_-18_NA | 0.11% | 14 | 77.26% | False | chr11: 5,249,970- | chr11: 5,254,894- | HBG1/2 c. −113 to −130 |
| | | | | | 5,249,987 | 5,254,911 | |
| 163_-10_NA | 0.11% | 14 | 77.38% | False | chr11: 5,249,965- | chr11: 5,254,889- | HBG1/2 c. −108 to −117 |
| | | | | | 5,249,974 | 5,254,898 | |
| 160_-11_NA | 0.11% | 14 | 77.49% | False | chr11: 5,249,962- | chr11: 5,254,886- | HBG1/2 c. −105 to −115 |
| | | | | | 5,249,972 | 5,254,896 | |
| 150_-21_NA | 0.11% | 13 | 77.59% | False | chr11: 5,249,952- | chr11: 5,254,876- | HBG1/2 c. −95 to −115 |
| | | | | | 5,249,972 | 5,254,896 | |
| 157_-23_NA | 0.11% | 13 | 77.70% | False | chr11: 5,249,959- | chr11: 5,254,883- | HBG1/2 c. −102 to −124 |
| | | | | | 5,249,981 | 5,254,905 | |
| 155_-16_NA | 0.11% | 12 | 77.81% | False | chr11: 5,249,957- | chr11: 5,254,881- | HBG1/2 c. −100 to −115 |
| | | | | | 5,249,972 | 5,254,896 | |
| 167_-17_NA | 0.11% | 12 | 77.92% | False | chr11: 5,249,969- | chr11: 5,254,893- | HBG1/2 c. −112 to −128 |
| | | | | | 5,249,985 | 5,254,909 | |
| 164_-28_NA | 0.11% | 13 | 78.02% | False | chr11: 5,249,966- | chr11: 5,254,890- | HBG1/2 c. −109 to −136 |
| | | | | | 5,249,993 | 5,254,917 | |
| 164_-27_NA | 0.10% | 14 | 78.12% | False | chr11: 5,249,966- | chr11: 5,254,890- | HBG1/2 c. −109 to −135 |
| | | | | | 5,249,992 | 5,254,916 | |
| 156_-38_NA | 0.10% | 13 | 78.22% | True | chr11: 5,249,958- | chr11: 5,254,882- | HBG1/2 c. −101 to −138 |
| | | | | | 5,249,995 | 5,254,919 | |
| 154_-18_NA | 0.10% | 12 | 78.32% | False | chr11: 5,249,956- | chr11: 5,254,880- | HBG1/2 c. −99 to −116 |
| | | | | | 5,249,973 | 5,254,897 | |
| 156_-27_NA | 0.10% | 13 | 78.42% | True | chr11: 5,249,958- | chr11: 5,254,882- | HBG1/2 c. −101 to −127 |
| | | | | | 5,249,984 | 5,254,908 | |
| 157_-24_NA | 0.10% | 11 | 78.52% | False | chr11: 5,249,959- | chr11: 5,254,883- | HBG1/2 c. −102 to −125 |
| | | | | | 5,249,982 | 5,254,906 | |
| 168_-19_NA | 0.10% | 14 | 78.62% | False | chr11: 5,249,970- | chr11: 5,254,894- | HBG1/2 c. −113 to −131 |
| | | | | | 5,249,988 | 5,254,912 | |
| 165_-10_NA | 0.10% | 14 | 78.72% | False | chr11: 5,249,967- | chr11: 5,254,891- | HBG1/2 c. −110 to −119 |
| | | | | | 5,249,976 | 5,254,900 | |
| 171_-1_NA | 0.10% | 14 | 78.82% | False | chr11: 5,249,973- | chr11: 5,254,897- | HBG1/2 c. −116 to −116 |
| | | | | | 5,249,973 | 5,254,897 | |
| 165_-16_NA | 0.10% | 13 | 78.92% | False | chr11: 5,249,967- | chr11: 5,254,891- | HBG1/2 c. −110 to −125 |
| | | | | | 5,249,982 | 5,254,906 | |
| 164_-14_NA | 0.10% | 12 | 79.02% | False | chr11: 5,249,966- | chr11: 5,254,890- | HBG1/2 c. −109 to −122 |
| | | | | | 5,249,979 | 5,254,903 | |
| 167_-4_NA; | 0.10% | 14 | 79.11% | False | chr11: 5,249,969- | chr11: 5,254,893- | HBG1/2 c. −112 to −115; |
| 175_-1_NA | | | | | 5,249,972; | 5,254,896; | HBG1/2 c. −120 to −120 |
| | | | | | chr11: 5,249,977- | chr11: 5,254,901- | |
| | | | | | 5,249,977 | 5,254,901 | |
| 160_-19_NA | 0.10% | 14 | 79.21% | False | chr11: 5,249,962- | chr11: 5,254,886- | HBG1/2 c. −105 to −123 |
| | | | | | 5,249,980 | 5,254,904 | |
| 166_-17_NA | 0.10% | 13 | 79.30% | False | chr11: 5,249,968- | chr11: 5,254,892- | HBG1/2 c. −111 to −127 |
| | | | | | 5,249,984 | 5,254,908 | |
| 168_-15_NA | 0.10% | 14 | 79.40% | True | chr11: 5,249,970- | chr11: 5,254,894- | HBG1/2 c. −113 to −127 |
| | | | | | 5,249,984 | 5,254,908 | |
| 162_-33_NA | 0.09% | 12 | 79.49% | True | chr11: 5,249,964- | chr11: 5,254,888- | HBG1/2 c. −107 to −139 |
| | | | | | 5,249,996 | 5,254,920 | |
| 168_-25_NA | 0.09% | 13 | 79.58% | False | chr11: 5,249,970- | chr11: 5,254,894- | HBG1/2 c. −113 to −137 |
| | | | | | 5,249,994 | 5,254,918 | |
| 166_-20_NA | 0.09% | 10 | 79.67% | False | chr11: 5,249,968- | chr11: 5,254,892- | HBG1/2 c. −111 to −130 |
| | | | | | 5,249,987 | 5,254,911 | |
| 170_-3_NA | 0.09% | 13 | 79.76% | False | chr11: 5,249,972- | chr11: 5,254,896- | HBG1/2 c. −115 to −117 |
| | | | | | 5,249,974 | 5,254,898 | |
| 157_-28_NA | 0.09% | 11 | 79.84% | False | chr11: 5,249,959- | chr11: 5,254,883- | HBG1/2 c. −102 to −129 |
| | | | | | 5,249,986 | 5,254,910 | |
| 166_-26_NA | 0.09% | 13 | 79.93% | False | chr11: 5,249,968- | chr11: 5,254,892- | HBG1/2 c. −111 to −136 |
| | | | | | 5,249,993 | 5,254,917 | |
| 160_-259_NA | 0.08% | 9 | 80.01% | True | chr11: 5,249,962- | chr11: 5,254,886- | HBG1/2 c. −105 to −363 |
| | | | | | 5,250,220 | 5,255,144 | |
| 160_-16_NA | 0.08% | 12 | 80.09% | False | chr11: 5,249,962- | chr11: 5,254,886- | HBG1/2 c. −105 to −120 |
| | | | | | 5,249,977 | 5,254,901 | |
| 159_-23_NA | 0.08% | 13 | 80.17% | False | chr11: 5,249,961- | chr11: 5,254,885- | HBG1/2 c. −104 to −126 |
| | | | | | 5,249,983 | 5,254,907 | |
| 167_-25_NA | 0.08% | 13 | 80.25% | False | chr11: 5,249,969- | chr11: 5,254,893- | HBG1/2 c. −112 to −136 |
| | | | | | 5,249,993 | 5,254,917 | |
| 165_-6_NA; | 0.08% | 14 | 80.33% | False | chr11: 5,249,967- | chr11: 5,254,891- | HBG1/2 c. −110 to −115; |
| 175_-1_NA | | | | | 5,249,972; | 5,254,896; | HBG1/2 c. −120 to −120 |
| | | | | | chr11: 5,249,977- | chr11: 5,254,901- | |
| | | | | | 5,249,977 | 5,254,901 | |
| 157_-14_NA | 0.08% | 13 | 80.41% | False | chr11: 5,249,959- | chr11: 5,254,883- | HBG1/2 c. −102 to −115 |
| | | | | | 5,249,972 | 5,254,896 | |
| 154_-28_NA | 0.08% | 13 | 80.49% | True | chr11: 5,249,956- | chr11: 5,254,880- | HBG1/2 c. −99 to −126 |
| | | | | | 5,249,983 | 5,254,907 | |
| 168_-23_NA | 0.08% | 12 | 80.56% | False | chr11: 5,249,970- | chr11: 5,254,894- | HBG1/2 c. −113 to −135 |
| | | | | | 5,249,992 | 5,254,916 | |
| 169_-23_NA | 0.08% | 14 | 80.64% | False | chr11: 5,249,971- | chr11: 5,254,895- | HBG1/2 c. −114 to −136 |
| | | | | | 5,249,993 | 5,254,917 | |
| 167_-4_NA; | 0.07% | 12 | 80.71% | False | chr11: 5,249,969- | chr11: 5,254,893- | HBG1/2 c. −112 to −115; |
| 174_-2_NA | | | | | 5,249,972; | 5,254,896; | HBG1/2 c. −119 to −120 |
| | | | | | chr11: 5,249,976- | chr11: 5,254,900- | |
| | | | | | 5,249,977 | 5,254,901 | |
| 167_-36_NA | 0.07% | 11 | 80.79% | True | chr11: 5,249,969- | chr11: 5,254,893- | HBG1/2 c. −112 to −147 |
| | | | | | 5,250,004 | 5,254,928 | |
| 165_-29_NA | 0.07% | 12 | 80.86% | False | chr11: 5,249,967- | chr: 5,254,891- | HBG1/2 c. −110 to −138 |
| | | | | | 5,249,995 | 5,254,919 | |
| 163_-6_NA | 0.07% | 13 | 80.93% | False | chr11: 5,249,965- | chr11: 5,254,889- | HBG1/2 c. −108 to −113 |
| | | | | | 5,249,970 | 5,254,894 | |
| 159_-33_NA | 0.07% | 13 | 81.01% | True | chr11: 5,249,961- | chr11: 5,254,885- | HBG1/2 c. −104 to −136 |
| | | | | | 5,249,993 | 5,254,917 | |
| 162_-11_NA | 0.07% | 13 | 81.08% | False | chr11: 5,249,964- | chr11: 5,254,888- | HBG1/2 c. −107 to −117 |
| | | | | | 5,249,974 | 5,254,898 | |
| 167_-20_NA | 0.07% | 10 | 81.15% | False | chr11: 5,249,969- | chr11: 5,254,893- | HBG1/2 c. −112 to −131 |
| | | | | | 5,249,988 | 5,254,912 | |
| 169_-24_NA | 0.07% | 13 | 81.21% | False | chr11: 5,249,971- | chr11: 5,254,895- | HBG1/2 c. −114 to −137 |
| | | | | | 5,249,994 | 5,254,918 | |
| 167_-24_NA | 0.07% | 11 | 81.28% | False | chr11: 5,249,969- | chr11: 5,254,893- | HBG1/2 c. −112 to −135 |
| | | | | | 5,249,992 | 5,254,916 | |
| 164_-15_NA | 0.07% | 13 | 81.35% | False | chr11: 5,249,966- | chr11: 5,254,890- | HBG1/2 c. −109 to −123 |
| | | | | | 5,249,980 | 5,254,904 | |
| 166_-19_NA | 0.07% | 12 | 81.42% | False | chr11: 5,249,968- | chr11: 5,254,892- | HBG1/2 c. −111 to −129 |
| | | | | | 5,249,986 | 5,254,910 | |
| 166_-1_NA | 0.07% | 13 | 81.49% | False | chr11: 5,249,968- | chr11: 5,254,892- | HBG1/2 c. −111 to −111 |
| | | | | | 5,249,968 | 5,254,892 | |
| 169_-17_NA | 0.07% | 12 | 81.55% | False | chr11: 5,249,971- | chr11: 5,254,895- | HBG1/2 c. −114 to −130 |
| | | | | | 5,249,987 | 5,254,911 | |
| 154_-17_NA | 0.07% | 11 | 81.62% | False | chr11: 5,249,956- | chr11: 5,254,880- | HBG1/2 c. −99 to −115 |
| | | | | | 5,249,972 | 5,254,896 | |
| 164_-11_NA | 0.07% | 12 | 81.68% | False | chr11: 5,249,966- | chr11: 5,254,890- | HBG1/2 c. −109 to −119 |
| | | | | | 5,249,976 | 5,254,900 | |
| 166_-5_NA; | 0.07% | 12 | 81.75% | False | chr11: 5,249,968- | chr11: 5,254,892- | HBG1/2 c. −111 to −115; |
| 175_-1_NA | | | | | 5,249,972; | 5,254,896; | HBG1/2 c. −120 to −120 |
| | | | | | chr11: 5,249,977- | chr11: 5,254,901- | |
| | | | | | 5,249,977 | 5,254,901 | |
| 170_-10_NA | 0.07% | 14 | 81.81% | False | chr11: 5,249,972- | chr11: 5,254,896- | HBG1/2 c. −115 to −124 |
| | | | | | 5,249,981 | 5,254,905 | |
| 152_-19_NA | 0.06% | 11 | 81.88% | False | chr11: 5,249,954- | chr11: 5,254,878- | HBG1/2 c. −97 to −115 |
| | | | | | 5,249,972 | 5,254,896 | |
| 166_-23_NA | 0.06% | 12 | 81.94% | False | chr11: 5,249,968- | chr11: 5,254,892- | HBG1/2 c. −111 to −133 |
| | | | | | 5,249,990 | 5,254,914 | |
| 162_-19_NA | 0.06% | 14 | 82.01% | False | chr11: 5,249,964- | chr11: 5,254,888- | HBG1/2 c. −107 to −125 |
| | | | | | 5,249,982 | 5,254,906 | |
| 167_-38_NA | 0.06% | 12 | 82.07% | False | chr11: 5,249,969- | chr11: 5,254,893- | HBG1/2 c. −112 to −149 |
| | | | | | 5,250,006 | 5,254,930 | |
| 161_-10_NA | 0.06% | 13 | 82.14% | False | chr11: 5,249,963- | chr11: 5,254,887- | HBG1/2 c. −106 to −115 |
| | | | | | 5,249,972 | 5,254,896 | |
| 158_-15_NA | 0.06% | 12 | 82.20% | False | chr11: 5,249,960- | chr11: 5,254,884- | HBG1/2 c. −103 to −117 |
| | | | | | 5,249,974 | 5,254,898 | |
| 163_-11_NA | 0.06% | 12 | 82.26% | False | chr11: 5,249,965- | chr11: 5,254,889- | HBG1/2 c. −108 to −118 |
| | | | | | 5,249,975 | 5,254,899 | |
| 168_-17_NA | 0.06% | 11 | 82.33% | False | chr11: 5,249,970- | chr11: 5,254,894- | HBG1/2 c. −113 to −129 |
| | | | | | 5,249,986 | 5,254,910 | |
| 151_-43_NA | 0.06% | 12 | 82.39% | True | chr11: 5,249,953- | chr11: 5,254,877- | HBG1/2 c. −96 to −138 |
| | | | | | 5,249,995 | 5,254,919 | |
| 158_-16_NA | 0.06% | 12 | 82.45% | False | chr11: 5,249,960- | chr11: 5,254,884- | HBG1/2 c. −103 to −118 |
| | | | | | 5,249,975 | 5,254,899 | |
| 169_-19_NA | 0.06% | 13 | 82.51% | False | chr11: 5,249,971- | chr11: 5,254,895- | HBG1/2 c. −114 to −132 |
| | | | | | 5,249,989 | 5,254,913 | |
| 170_-17_NA | 0.06% | 12 | 82.57% | False | chr11: 5,249,972- | chr11: 5,254,896- | HBG1/2 c. −115 to −131 |
| | | | | | 5,249,988 | 5,254,912 | |
| 158_-21_NA | 0.06% | 12 | 82.63% | False | chr11: 5,249,960- | chr11: 5,254,884- | HBG1/2 c. −103 to −123 |
| | | | | | 5,249,980 | 5,254,904 | |
| 152_-28_NA | 0.06% | 13 | 82.69% | False | chr11: 5,249,954- | chr11: 5,254,878- | HBG1/2 c. −97 to −124 |
| | | | | | 5,249,981 | 5,254,905 | |
| 150_-33_NA | 0.06% | 13 | 82.74% | False | chr11: 5,249,952- | chr11: 5,254,876- | HBG1/2 c. −95 to −127 |
| | | | | | 5,249,984 | 5,254,908 | |
| 170_-13_NA | 0.05% | 13 | 82.80% | False | chr11: 5,249,972- | chr11: 5,254,896- | HBG1/2 c. −115 to −127 |
| | | | | | 5,249,984 | 5,254,908 | |
| 165_-19_NA | 0.05% | 13 | 82.85% | False | chr11: 5,249,967- | chr11: 5,254,891- | HBG1/2 c. −110 to −128 |
| | | | | | 5,249,985 | 5,254,909 | |
| 158_-17_NA | 0.05% | 11 | 82.91% | False | chr11: 5,249,960- | chr11: 5,254,884- | HBG1/2 c. −103 to −119 |
| | | | | | 5,249,976 | 5,254,900 | |
| 159_-11_NA | 0.05% | 7 | 82.96% | False | chr11: 5,249,961- | chr11: 5,254,885- | HBG1/2 c. −104 to −114 |
| | | | | | 5,249,971 | 5,254,895 | |
| 158_-20_NA | 0.05% | 12 | 83.01% | False | chr11: 5,249,960- | chr11: 5,254,884- | HBG1/2 c. −103 to −122 |
| | | | | | 5,249,979 | 5,254,903 | |
| 155_-12_NA | 0.05% | 10 | 83.07% | True | chr11: 5,249,957- | chr11: 5,254,881- | HBG1/2 c. −100 to −111 |
| | | | | | 5,249,968 | 5,254,892 | |
| 168_-3_NA; | 0.05% | 12 | 83.12% | False | chr11: 5,249,970- | chr11: 5,254,894- | HBG1/2 c. −113 to −115; |
| 175_-1_NA | | | | | 5,249,972; | 5,254,896; | HBG1/2 c. −120 to −120 |
| | | | | | chr11: 5,249,977- | chr11: 5,254,901- | |
| | | | | | 5,249,977 | 5,254,901 | |
| 169_-16_NA | 0.05% | 14 | 83.17% | False | chr11: 5,249,971- | chr11: 5,254,895- | HBG1/2 c. −114 to −129 |
| | | | | | 5,249,986 | 5,254,910 | |
| 157_-40_NA | 0.05% | 13 | 83.22% | True | chr11: 5,249,959- | chr11: 5,254,883- | HBG1/2 c. −102 to −141 |
| | | | | | 5,249,998 | 5,254,922 | |
| 168_-24_NA | 0.05% | 11 | 83.27% | False | chr11: 5,249,970- | chr11: 5,254,894- | HBG1/2 c. −113 to −136 |
| | | | | | 5,249,993 | 5,254,917 | |
| 165_-6_NA; | 0.05% | 12 | 83.33% | False | chr11: 5,249,967- | chr11: 5,254,891- | HBG1/2 c. −110 to −115; |
| 174_-2_NA | | | | | 5,249,972; | 5,254,896; | HBG1/2 c. −119 to −120 |
| | | | | | chr11: 5,249,976- | chr11: 5,254,900- | |
| | | | | | 5,249,977 | 5,254,901 | |
| 158_-36_NA | 0.05% | 11 | 83.38% | False | chr11: 5,249,960- | chr11: 5,254,884- | HBG1/2 c. −103 to −138 |
| | | | | | 5,249,995 | 5,254,919 | |
| 169_-22_NA | 0.05% | 12 | 83.43% | False | chr11: 5,249,971- | chr11: 5,254,895- | HBG1/2 c. −114 to −135 |
| | | | | | 5,249,992 | 5,254,916 | |
| 157_-16_NA | 0.05% | 14 | 83.48% | False | chr11: 5,249,959- | chr11: 5,254,883- | HBG1/2 c. −102 to −117 |
| | | | | | 5,249,974 | 5,254,898 | |
| 165_-291_NA | 0.05% | 7 | 83.53% | True | chr11: 5,249,967- | chr11: 5,254,891- | HBG1/2 c. −110 to −400 |
| | | | | | 5,250,257 | 5,255,181 | |
| 173_-1_NA | 0.05% | 12 | 83.58% | False | chr11: 5,249,975- | chr11: 5,254,899- | HBG1/2 c. −118 to −118 |
| | | | | | 5,249,975 | 5,254,899 | |
| 167_-26_NA | 0.05% | 11 | 83.63% | False | chr11: 5,249,969- | chr11: 5,254,893- | HBG1/2 c. −112 to −137 |
| | | | | | 5,249,994 | 5,254,918 | |
| 148_-22_NA | 0.05% | 10 | 83.68% | True | chr11: 5,249,950- | chr11: 5,254,874- | HBG1/2 c. −93 to −114 |
| | | | | | 5,249,971 | 5,254,895 | |
| 152_-23_NA | 0.05% | 10 | 83.72% | False | chr11: 5,249,954- | chr11: 5,254,878- | HBG1/2 c. −97 to −119 |
| | | | | | 5,249,976 | 5,254,900 | |
| 165_-4_NA | 0.05% | 11 | 83.77% | False | chr11: 5,249,967- | chr11: 5,254,891- | HBG1/2 c. −110 to −113 |
| | | | | | 5,249,970 | 5,254,894 | |
| 165_-17_NA | 0.05% | 12 | 83.82% | False | chr11: 5,249,967- | chr11: 5,254,891- | HBG1/2 c. −110 to −126 |
| | | | | | 5,249,983 | 5,254,907 | |
| 165_-298_NA | 0.05% | 6 | 83.87% | False | chr11: 5,249,967- | chr11: 5,254,891- | HBG1/2 c. −110 to −407 |
| | | | | | 5,250,264 | 5,255,188 | |
| 154_-23_NA | 0.05% | 11 | 83.92% | False | chr11: 5,249,956- | chr11: 5,254,880- | HBG1/2 c. −99 to −121 |
| | | | | | 5,249,978 | 5,254,902 | |
| 168_-3_NA; | 0.05% | 11 | 83.96% | False | chr11: 5,249,970- | chr11: 5,254,894- | HBG1/2 c. −113 to −115; |
| 174_-2_NA | | | | | 5,249,972; chr11: | 5,254,896; | HBG1/2 c. −119 to −120 |
| | | | | | 5,249,976- | chr11: 5,254,900- | |
| | | | | | 5,249,977 | 5,254,901 | |
| 165_-5_NA; | 0.05% | 1 | 84.01% | False | chr11: 5,249,967- | chr11: 5,254,891- | HBG1/2 c. −110 to −114; |
| 174_-12_NA | | | | | 5,249,971; | 5,254,895; | HBG1/2 c. −119 to −130 |
| | | | | | chr11: 5,249,976- | chr11: 5,254,900- | |
| | | | | | 5,249,987 | 5,254,911 | |
| 165_-271_NA | 0.05% | 6 | 84.06% | True | chr11: 5,249,967- | chr11: 5,254,891- | HBG1/2 c. −110 to −380 |
| | | | | | 5,250,237 | 5,255,161 | |
| 164_-4_NA; | 0.05% | 4 | 84.11% | False | chr11: 5,249,966- | chr11: 5,254,890- | HBG1/2 c. −109 to −112; |
| 174_-2_NA | | | | | 5,249,969; | 5,254,893; | HBG1/2 c. −119 to −120 |
| | | | | | chr11: 5,249,976- | chr11: 5,254,900- | |
| | | | | | 5,249,977 | 5,254,901 | |
| 160_-8_NA; | 0.05% | 7 | 84.15% | False | chr11: 5,249,962- | chr11: 5,254,886- | HBG1/2 c. −105 to −112; |
| 170_-251_NA | | | | | 5,249,969; | 5,254,893; | HBG1/2 c. −115 to −365 |
| | | | | | chr11: 5,249,972- | chr11: 5,254,896- | |
| | | | | | 5,250,222 | 5,255,146 | |
| 167_-31_NA | 0.05% | 11 | 84.20% | False | chr11: 5,249,969- | chr11: 5,254,893- | HBG1/2 c. −112 to −142 |
| | | | | | 5,249,999 | 5,254,923 | |
| 159_-24_NA | 0.05% | 9 | 84.24% | False | chr11: 5,249,961- | chr11: 5,254,885- | HBG1/2 c. −104 to −127 |
| | | | | | 5,249,984 | 5,254,908 | |
| 151_-32_NA | 0.05% | 11 | 84.29% | True | chr11: 5,249,953- | chr11: 5,254,877- | HBG1/2 c. −96 to −127 |
| | | | | | 5,249,984 | 5,254,908 | |
| 170_-8_NA | 0.04% | 13 | 84.34% | False | chr11: 5,249,972- | chr11: 5,254,896- | HBG1/2 c. −115 to −122 |
| | | | | | 5,249,979 | 5,254,903 | |
| 151_-29_NA | 0.04% | 12 | 84.38% | False | chr11: 5,249,953- | chr11: 5,254,877- | HBG1/2 c. −96 to −124 |
| | | | | | 5,249,981 | 5,254,905 | |
| 151_-22_NA | 0.04% | 12 | 84.42% | False | chr11: 5,249,953- | chr11: 5,254,877- | HBG1/2 c. −96 to −117 |
| | | | | | 5,249,974 | 5,254,898 | |
| 153_-21_NA | 0.04% | 11 | 84.47% | False | chr11: 5,249,955- | chr11: 5,254,879- | HBG1/2 c. −98 to −118 |
| | | | | | 5,249,975 | 5,254,899 | |
| 167_-19_NA | 0.04% | 10 | 84.51% | False | chr11: 5,249,969- | chr11: 5,254,893- | HBG1/2 c. −112 to −130 |
| | | | | | 5,249,987 | 5,254,911 | |
| 168_-22_NA | 0.04% | 13 | 84.56% | False | chr11: 5,249,970- | chr11: 5,254,894- | HBG1/2 c. −113 to −134 |
| | | | | | 5,249,991 | 5,254,915 | |
| 164_-26_NA | 0.04% | 10 | 84.60% | False | chr11: 5,249,966- | chr11: 5,254,890- | HBG1/2 c. −109 to −134 |
| | | | | | 5,249,991 | 5,254,915 | |
| 153_-34_NA | 0.04% | 14 | 84.64% | False | chr11: 5,249,955- | chr11: 5,254,879- | HBG1/2 c. −98 to −131 |
| | | | | | 5,249,988 | 5,254,912 | |
| 162_-15_NA | 0.04% | 11 | 84.68% | False | chr11: 5,249,964- | chr11: 5,254,888- | HBG1/2 c. −107 to −121 |
| | | | | | 5,249,978 | 5,254,902 | |
| 159_-27_NA | 0.04% | 11 | 84.72% | False | chr11: 5,249,961- | chr11: 5,254,885- | HBG1/2 c. −104 to −130 |
| | | | | | 5,249,987 | 5,254,911 | |
| 153_-37_NA | 0.04% | 9 | 84.76% | True | chr11: 5,249,955- | chr11: 5,254,879- | HBG1/2 c. −98 to −134 |
| | | | | | 5,249,991 | 5,254,915 | |
| 175_-1_NA | 0.04% | 12 | 84.80% | False | chr11: 5,249,977- | chr11: 5,254,901- | HBG1/2 c. −120 to −120 |
| | | | | | 5,249,977 | 5,254,901 | |
| 160_-10_NA | 0.04% | 11 | 84.84% | False | chr11: 5,249,962- | chr11: 5,254,886- | HBG1/2 c. −105 to −114 |
| | | | | | 5,249,971 | 5,254,895 | |
| 155_-19_NA | 0.04% | 11 | 84.88% | False | chr11: 5,249,957- | chr11: 5,254,881- | HBG1/2 c. −100 to −118 |
| | | | | | 5,249,975 | 5,254,899 | |
| 164_-5_NA | 0.04% | 9 | 84.92% | False | chr11: 5,249,966- | chr11: 5,254,890- | HBG1/2 c. −109 to −113 |
| | | | | | 5,249,970 | 5,254,894 | |
| 163_-15_NA | 0.04% | 12 | 84.96% | False | chr11: 5,249,965- | chr11: 5,254,889- | HBG1/2 c. −108 to −122 |
| | | | | | 5,249,979 | 5,254,903 | |
| 161_-22_NA | 0.04% | 9 | 85.00% | False | chr11: 5,249,963- | chr11: 5,254,887- | HBG1/2 c. −106 to −127 |
| | | | | | 5,249,984 | 5,254,908 | |
| 155_-17_NA | 0.04% | 12 | 85.04% | False | chr11: 5,249,957- | chr11: 5,254,881- | HBG1/2 c. −100 to −116 |
| | | | | | 5,249,973 | 5,254,897 | |
| 165_-6_NA; | 0.04% | 11 | 85.07% | False | chr11: 5,249,967- | chr11: 5,254,891- | HBG1/2 c. −110 to −115; |
| 176_-2_NA | | | | | 5,249,972; | 5,254,896; | HBG1/2 c. −121 to −122 |
| | | | | | chr11: 5,249,978- | chr11: 5,254,902- | |
| | | | | | 5,249,979 | 5,254,903 | |
| 150_-32_NA | 0.04% | 11 | 85.11% | False | chr11: 5,249,952- | chr11: 5,254,876- | HBG1/2 c. −95 to −126 |
| | | | | | 5,249,983 | 5,254,907 | |
| 169_-25_NA | 0.04% | 13 | 85.15% | False | chr11: 5,249,971- | chr11: 5,254,895- | HBG1/2 c. −114 to −138 |
| | | | | | 5,249,995 | 5,254,919 | |
| 148_-33_NA | 0.04% | 9 | 85.19% | False | chr11: 5,249,950- | chr11: 5,254,874- | HBG1/2 c. −93 to −125 |
| | | | | | 5,249,982 | 5,254,906 | |
| 166_-36_NA | 0.04% | 10 | 85.22% | False | chr11: 5,249,968- | chr11: 5,254,892- | HBG1/2 c. −111 to −146 |
| | | | | | 5,250,003 | 5,254,927 | |
| 164_-19_NA | 0.04% | 10 | 85.26% | False | chr11: 5,249,966- | chr11: 5,254,890- | HBG1/2 c. −109 to −127 |
| | | | | | 5,249,984 | 5,254,908 | |
| 171_-3_NA | 0.04% | 12 | 85.29% | False | chr11: 5,249,973- | chr11: 5,254,897- | HBG1/2 c. −116 to −118 |
| | | | | | 5,249,975 | 5,254,899 | |
| 169_-21_NA | 0.03% | 10 | 85.33% | False | chr11: 5,249,971- | chr11: 5,254,895- | HBG1/2 c. −114 to −134 |
| | | | | | 5,249,991 | 5,254,915 | |
| 152_-22_NA | 0.03% | 10 | 85.36% | False | chr11: 5,249,954- | chr11: 5,254,878- | HBG1/2 c. −97 to −118 |
| | | | | | 5,249,975 | 5,254,899 | |
| 165_-6_NA; | 0.03% | 10 | 85.40% | False | chr11: 5,249,967- | chr11: 5,254,891- | HBG1/2 c. −110 to −115; |
| 175_-2_NA | | | | | 5,249,972; | 5,254,896; | HBG1/2 c. −120 to −121 |
| | | | | | chr11: 5,249,977- | chr11: 5,254,901- | |
| | | | | | 5,249,978 | 5,254,902 | |
| 162_-311_NA | 0.03% | 1 | 85.43% | True | chr11: 5,249,964- | chr11: 5,254,888- | HBG1/2 c. −107 to −417 |
| | | | | | 5,250,274 | 5,255,198 | |
| 166_-5_NA; | 0.03% | 12 | 85.47% | False | chr11: 5,249,968- | chr11: 5,254,892- | HBG1/2 c. −111 to −115; |
| 174_-2_NA | | | | | 5,249,972; | 5,254,896; | HBG1/2 c. −119 to −120 |
| | | | | | chr11: 5,249,976- | chr11: 5,254,900- | |
| | | | | | 5,249,977 | 5,254,901 | |
| 168_-3_NA; | 0.03% | 10 | 85.50% | False | chr11: 5,249,970- | chr11: 5,254,894- | HBG1/2 c. −113 to −115; |
| 174_-4_NA | | | | | 5,249,972; | 5,254,896; | HBG1/2 c. −119 to −122 |
| | | | | | chr11: 5,249,976- | chr11: 5,254,900- | |
| | | | | | 5,249,979 | 5,254,903 | |
| 161_-15_NA | 0.03% | 12 | 85.54% | False | chr11: 5,249,963- | chr11: 5,254,887- | HBG1/2 c. −106 to −120 |
| | | | | | 5,249,977 | 5,254,901 | |
| 167_-1_NA; | 0.03% | 9 | 85.57% | False; True | chr11: 5,249,969- | chr11: 5,254,893- | HBG1/2 c. −112 to −112; |
| 172_-5_NA | | | | | 5,249,969; | 5,254,893; | HBG1/2 c. −117 to −121 |
| | | | | | chr11: 5,249,974- | chr11: 5,254,898- | |
| | | | | | 5,249,978 | 5,254,902 | |
| 157_-29_NA | 0.03% | 9 | 85.60% | False | chr11: 5,249,959- | chr11: 5,254,883- | HBG1/2 c. −102 to −130 |
| | | | | | 5,249,987 | 5,254,911 | |
| 163_-313_NA | 0.03% | 8 | 85.63% | True | chr11: 5,249,965- | chr11: 5,254,889- | HBG1/2 c. −108 to −420 |
| | | | | | 5,250,277 | 5,255,201 | |
| 152_-25_NA | 0.03% | 10 | 85.67% | False | chr11: 5,249,954- | chr11: 5,254,878- | HBG1/2 c. −97 to −121 |
| | | | | | 5,249,978 | 5,254,902 | |
| 159_-15_NA | 0.03% | 10 | 85.70% | False | chr11: 5,249,961- | chr11: 5,254,885- | HBG1/2 c. −104 to −118 |
| | | | | | 5,249,975 | 5,254,899 | |
| 156_-20_NA | 0.03% | 8 | 85.73% | False | chr11: 5,249,958- | chr11: 5,254,882- | HBG1/2 c. −101 to −120 |
| | | | | | 5,249,977 | 5,254,901 | |
| 157_-21_NA | 0.03% | 10 | 85.76% | False | chr11: 5,249,959- | chr11: 5,254,883- | HBG1/2 c. −102 to −122 |
| | | | | | 5,249,979 | 5,254,903 | |
| 168_-30_NA | 0.03% | 11 | 85.79% | True | chr11: 5,249,970- | chr11: 5,254,894- | HBG1/2 c. −113 to −142 |
| | | | | | 5,249,999 | 5,254,923 | |
| 161_-40_NA | 0.03% | 8 | 85.82% | True | chr11: 5,249,963- | chr11: 5,254,887- | HBG1/2 c. −106 to −145 |
| | | | | | 5,250,002 | 5,254,926 | |
| 172_-18_NA | 0.03% | 10 | 85.85% | False | chr11: 5,249,974- | chr11: 5,254,898- | HBG1/2 c. −117 to −134 |
| | | | | | 5,249,991 | 5,254,915 | |
| 167_-11_NA; | 0.03% | 4 | 85.88% | False | chr11: 5,249,969- | chr11: 5,254,893- | HBG1/2 c. −112 to −122; |
| 180_-2_NA | | | | | 5,249,979; | 5,254,903; | HBG1/2 c. −125 to −126 |
| | | | | | chr11: 5,249,982- | chr11: 5,254,906- | |
| | | | | | 5,249,983 | 5,254,907 | |
| 167_-4_NA; | 0.03% | 9 | 85.91% | False | chr11: 5,249,969- | chr11: 5,254,893- | HBG1/2 c. −112 to −115; |
| 175_-2_NA | | | | | 5,249,972; | 5,254,896; | HBG1/2 c. −120 to −121 |
| | | | | | chr11: 5,249,977- | chr11: 5,254,901- | |
| | | | | | 5,249,978 | 5,254,902 | |
| 166_-5_NA; | 0.03% | 6 | 85.94% | False | chr11: 5,249,968- | chr11: 5,254,892- | HBG1/2 c. −111 to −115; |
| 175_-2_NA | | | | | 5,249,972; | 5,254,896; | HBG1/2 c. −120 to −121 |
| | | | | | chr11: 5,249,977- | chr11: 5,254,901- | |
| | | | | | 5,249,978 | 5,254,902 | |
| 161_-8_NA | 0.03% | 10 | 85.97% | False | chr11: 5,249,963- | chr11: 5,254,887- | HBG1/2 c. −106 to −113 |
| | | | | | 5,249,970 | 5,254,894 | |
| 162_-23_NA | 0.03% | 9 | 86.00% | False | chr11: 5,249,964- | chr11: 5,254,888- | HBG1/2 c. −107 to −129 |
| | | | | | 5,249,986 | 5,254,910 | |
| 156_-30_NA | 0.03% | 8 | 86.03% | False | chr11: 5,249,958- | chr11: 5,254,882- | HBG1/2 c. −101 to −130 |
| | | | | | 5,249,987 | 5,254,911 | |
| 46_-338_NA | 0.03% | 1 | 86.05% | True | chr11: 5,249,848- | chr11: 5,254,772- | HBG1/2 c. 9 to −328 |
| | | | | | 5,250,185 | 5,255,109 | |
| 150_-41_NA | 0.03% | 6 | 86.08% | False | chr11: 5,249,952- | chr11: 5,254,876- | HBG1/2 c. −95 to −135 |
| | | | | | 5,249,992 | 5,254,916 | |
| 154_-20_NA | 0.03% | 11 | 86.11% | False | chr11: 5,249,956- | chr11: 5,254,880- | HBG1/2 c. −99 to −118 |
| | | | | | 5,249,975 | 5,254,899 | |
| 156_-17_NA | 0.03% | 12 | 86.14% | False | chr11: 5,249,958- | chr11: 5,254,882- | HBG1/2 c. −101 to −117 |
| | | | | | 5,249,974 | 5,254,898 | |
| 158_-25_NA | 0.03% | 9 | 86.16% | False | chr11: 5,249,960- | chr11: 5,254,884- | HBG1/2 c. −103 to −127 |
| | | | | | 5,249,984 | 5,254,908 | |
| 161_-32_NA | 0.03% | 10 | 86.19% | False | chr11: 5,249,963- | chr11: 5,254,887- | HBG1/2 c. −106 to −137 |
| | | | | | 5,249,994 | 5,254,918 | |
| 168_-32_NA | 0.03% | 10 | 86.22% | False | chr11: 5,249,970- | chr11: 5,254,894- | HBG1/2 c. −113 to −144 |
| | | | | | 5,250,001 | 5,254,925 | |
| 151_-30_NA | 0.03% | 8 | 86.24% | False | chr11: 5,249,953- | chr11: 5,254,877- | HBG1/2 c. −96 to −125 |
| | | | | | 5,249,982 | 5,254,906 | |
| 156_-40_NA | 0.03% | 5 | 86.27% | False | chr11: 5,249,958- | chr11: 5,254,882- | HBG1/2 c. −101 to −140 |
| | | | | | 5,249,997 | 5,254,921 | |
| 168_-29_NA | 0.03% | 8 | 86.29% | False | chr11: 5,249,970- | chr11: 5,254,894- | HBG1/2 c. −113 to −141 |
| | | | | | 5,249,998 | 5,254,922 | |
| 165_-38_NA | 0.03% | 10 | 86.32% | False | chr11: 5,249,967- | chr11: 5,254,891- | HBG1/2 c. −110 to −147 |
| | | | | | 5,250,004 | 5,254,928 | |
| 165_-2_NA; | 0.03% | 1 | 86.35% | False | chr11: 5,249,967- | chr11: 5,254,891- | HBG1/2 c. −110 to −111; |
| 170_-14_NA; | | | | | 5,249,968; | 5,254,892; | HBG1/2 c. −115 to −128; |
| 188_1_A | | | | | chr11: 5,249,972- | chr11: 5,254,896- | HBG1/2 c. −133 to −131 |
| | | | | | 5,249,985; | 5,254,909; | |
| | | | | | chr11: 5,249,990- | chr11: 5,254,914- | |
| | | | | | 5,249,988 | 5,254,912 | |
| 163_-16_NA | 0.02% | 10 | 86.37% | False | chr11: 5,249,965- | chr11: 5,254,889- | HBG1/2 c. −108 to −123 |
| | | | | | 5,249,980 | 5,254,904 | |
| 172_-2_NA | 0.02% | 9 | 86.39% | False | chr11: 5,249,974- | chr11: 5,254,898- | HBG1/2 c. −117 to −118 |
| | | | | | 5,249,975 | 5,254,899 | |
| 174_-2_NA | 0.02% | 11 | 86.42% | False | chr11: 5,249,976- | chr11: 5,254,900- | HBG1/2 c. −119 to −120 |
| | | | | | 5,249,977 | 5,254,901 | |
| 166_-7_NA; | 0.02% | 6 | 86.44% | False | chr11: 5,249,968- | chr11: 5,254,892- | HBG1/2 c. −111 to −117; |
| 176_-2_NA | | | | | 5,249,974; | 5,254,898; | HBG1/2 c. −121 to −122 |
| | | | | | chr11: 5,249,978- | chr11: 5,254,902- | |
| | | | | | 5,249,979 | 5,254,903 | |
| 160_-21_NA | 0.02% | 11 | 86.47% | False | chr11: 5,249,962- | chr11: 5,254,886- | HBG1/2 c. −105 to −125 |
| | | | | | 5,249,982 | 5,254,906 | |
| 155_-24_NA | 0.02% | 10 | 86.49% | False | chr11: 5,249,957- | chr11: 5,254,881- | HBG1/2 c. −100 to −123 |
| | | | | | 5,249,980 | 5,254,904 | |
| 164_-20_NA | 0.02% | 7 | 86.52% | False | chr11: 5,249,966- | chr11: 5,254,890- | HBG1/2 c. −109 to −128 |
| | | | | | 5,249,985 | 5,254,909 | |
| 169_-8_NA; | 0.02% | 2 | 86.54% | False | chr11: 5,249,971- | chr11: 5,254,895- | HBG1/2 c. −114 to −121; |
| 180_-5_NA | | | | | 5,249,978; | 5,254,902; | HBG1/2 c. −125 to −129 |
| | | | | | chr11: 5,249,982- | chr11: 5,254,906- | |
| | | | | | 5,249,986 | 5,254,910 | |
| 167_-28_NA | 0.02% | 10 | 86.56% | False | chr11: 5,249,969- | chr11: 5,254,893- | HBG1/2 c. −112 to −139 |
| | | | | | 5,249,996 | 5,254,920 | |
| 158_-22_NA | 0.02% | 10 | 86.59% | False | chr11: 5,249,960- | chr11: 5,254,884- | HBG1/2 c. −103 to −124 |
| | | | | | 5,249,981 | 5,254,905 | |
| 164_-16_NA | 0.02% | 11 | 86.61% | False | chr11: 5,249,966- | chr11: 5,254,890- | HBG1/2 c. −109 to −124 |
| | | | | | 5,249,981 | 5,254,905 | |
| 169_-4_NA; | 0.02% | 7 | 86.63% | False | chr11: 5,249,971- | chr11: 5,254,895- | HBG1/2 c. −114 to −117; |
| 175_-2_NA | | | | | 5,249,974; | 5,254,898; | HBG1/2 c. −120 to −121 |
| | | | | | chr11: 5,249,977- | chr11: 5,254,901- | |
| | | | | | 5,249,978 | 5,254,902 | |
| 151_-25_NA | 0.02% | 10 | 86.66% | False | chr11: 5,249,953- | chr11: 5,254,877- | HBG1/2 c. −96 to −120 |
| | | | | | 5,249,977 | 5,254,901 | |
| 165_-6_NA; | 0.02% | 11 | 86.68% | False | chr11: 5,249,967- | chr11: 5,254,891- | HBG1/2 c. −110 to −115; |
| 174_-4_NA | | | | | 5,249,972; | 5,254,896; | HBG1/2 c. −119 to −122 |
| | | | | | chr11: 5,249,976- | chr11: 5,254,900- | |
| | | | | | 5,249,979 | 5,254,903 | |
| 157_-13_NA; | 0.02% | 8 | 86.70% | False; True | chr11: 5,249,959- | chr11: 5,254,883- | HBG1/2 c. −102 to −114; |
| 180_-5_NA | | | | | 5,249,971; | 5,254,895; | HBG1/2 c. −125 to −129 |
| | | | | | chr11: 5,249,982- | chr11: 5,254,906- | |
| | | | | | 5,249,986 | 5,254,910 | |
| 156_-36_NA | 0.02% | 6 | 86.73% | False | chr11: 5,249,958- | chr11: 5,254,882- | HBG1/2 c. −101 to −136 |
| | | | | | 5,249,993 | 5,254,917 | |
| 164_-10_NA; | 0.02% | 1 | 86.75% | False | chr11: 5,249,966- | chr11: 5,254,890- | HBG1/2 c. −109 to −118; |
| 177_-2_NA | | | | | 5,249,975; | 5,254,899; | HBG1/2 c. −122 to −123 |
| | | | | | chr11: 5,249,979- | chr11: 5,254,903- | |
| | | | | | 5,249,980 | 5,254,904 | |
| 166_-293_NA | 0.02% | 2 | 86.77% | False | chr11: 5,249,968- | chr11: 5,254,892- | HBG1/2 c. −111 to −403 |
| | | | | | 5,250,260 | 5,255,184 | |
| 156_-31_NA | 0.02% | 8 | 86.79% | False | chr11: 5,249,958- | chr11: 5,254,882- | HBG1/2 c. −101 to −131 |
| | | | | | 5,249,988 | 5,254,912 | |
| 169_-8_NA; | 0.02% | 4 | 86.82% | False; True | chr11: 5,249,971- | chr11: 5,254,895- | HBG1/2 c. −114 to −121; |
| 180_-4_NA | | | | | 5,249,978; | 5,254,902; | HBG1/2 c. −125 to −128 |
| | | | | | chr11: 5,249,982- | chr11: 5,254,906- | |
| | | | | | 5,249,985 | 5,254,909 | |
| 155_-8_NA; | 0.02% | 1 | 86.84% | False | chr11: 5,249,957- | chr11: 5,254,881- | HBG1/2 c. −100 to −107; |
| 165_-5_NA | | | | | 5,249,964; | 5,254,888; | HBG1/2 c. −110 to −114 |
| | | | | | chr11: 5,249,967- | chr11: 5,254,891- | |
| | | | | | 5,249,971 | 5,254,895 | |
| 167_1_C; | 0.02% | 1 | 86.86% | False | chr11: 5,249,969- | chr11: 5,254,893- | HBG1/2 c. −112 to −110; |
| 171_-4_NA | | | | | 5,249,967; | 5,254,891; | HBG1/2 c. −116 to −119 |
| | | | | | chr11: 5,249,973- | chr11: 5,254,897- | |
| | | | | | 5,249,976 | 5,254,900 | |
| 165_-7_NA; | 0.02% | 6 | 86.88% | False | chr11: 5,249,967- | chr11: 5,254,891- | HBG1/2 c. −110 to −116; |
| 175_-1_NA | | | | | 5,249,973; | 5,254,897; | HBG1/2 c. −120 to −120 |
| | | | | | chr11: 5,249,977- | chr11: 5,254,901- | |
| | | | | | 5,249,977 | 5,254,901 | |
| 160_-20_NA | 0.02% | 11 | 86.91% | False | chr11: 5,249,962- | chr11: 5,254,886- | HBG1/2 c. −105 to −124 |
| | | | | | 5,249,981 | 5,254,905 | |
| 152_-21_NA | 0.02% | 9 | 86.93% | False | chr11: 5,249,954- | chr11: 5,254,878- | HBG1/2 c. −97 to −117 |
| | | | | | 5,249,974 | 5,254,898 | |
| 165_-39_NA | 0.02% | 9 | 86.95% | False | chr11: 5,249,967- | chr11: 5,254,891- | HBG1/2 c. −110 to −148 |
| | | | | | 5,250,005 | 5,254,929 | |
| 164_-4_NA | 0.02% | 7 | 86.97% | False | chr11: 5,249,966- | chr11: 5,254,890- | HBG1/2 c. −109 to −112 |
| | | | | | 5,249,969 | 5,254,893 | |
| 165_-3_NA; | 0.02% | 10 | 86.99% | False | chr11: 5,249,967- | chr11: 5,254,891- | HBG1/2 c. −110 to −112; |
| 171_-3_NA | | | | | 5,249,969; | 5,254,893; | HBG1/2 c. −116 to −118 |
| | | | | | chr11: 5,249,973- | chr11: 5,254,897- | |
| | | | | | 5,249,975 | 5,254,899 | |
| 165_-2_NA; | 0.02% | 9 | 87.02% | False | chr11: 5,249,967- | chr11: 5,254,891- | HBG1/2 c. −110 to −111; |
| 170_-4_NA | | | | | 5,249,968; | 5,254,892; | HBG1/2 c. −115 to −118 |
| | | | | | chr11: 5,249,972- | chr11: 5,254,896- | |
| | | | | | 5,249,975 | 5,254,899 | |
| 160_-11_NA; | 0.02% | 1 | 87.04% | False | chr11: 5,249,962- | chr11: 5,254,886- | HBG1/2 c. −105 to −115; |
| 174_-9_NA | | | | | 5,249,972; | 5,254,896; | HBG1/2 c. −119 to −127 |
| | | | | | chr11: 5,249,976- | chr11: 5,254,900- | |
| | | | | | 5,249,984 | 5,254,908 | |
| 165_-4_NA; | 0.02% | 1 | 87.06% | False | chr11: 5,249,967- | chr11: 5,254,891- | HBG1/2 c. −110 to −113; |
| 171_1_C | | | | | 5,249,970; | 5,254,894; | HBG1/2 c. −116 to −114 |
| | | | | | chr11: 5,249,973- | chr11: 5,254,897- | |
| | | | | | 5,249,971 | 5,254,895 | |
| 168_1_A | 0.02% | 8 | 87.08% | False | chr11: 5,249,970- | chr11: 5,254,894- | HBG1/2 c. −113 to −111 |
| | | | | | 5,249,968 | 5,254,892 | |
| 37_-362_NA | 0.02% | 3 | 87.10% | True | chr11: 5,249,839- | chr11: 5,254,763- | HBG1/2 c. 18 to −343 |
| | | | | | 5,250,200 | 5,255,124 | |
| 152_-54_NA | 0.02% | 7 | 87.12% | True | chr11: 5,249,954- | chr11: 5,254,878- | HBG1/2 c. −97 to −150 |
| | | | | | 5,250,007 | 5,254,931 | |
| 161_-237_NA | 0.02% | 5 | 87.14% | True | chr11: 5,249,963- | chr11: 5,254,887- | HBG1/2 c. −106 to −342 |
| | | | | | 5,250,199 | 5,255,123 | |
| 167_-5_NA; | 0.02% | 6 | 87.16% | False | chr11: 5,249,969- | chr11: 5,254,893- | HBG1/2 c. −112 to −116; |
| 175_-1_NA | | | | | 5,249,973; | 5,254,897; | HBG1/2 c. −120 to −120 |
| | | | | | chr11: 5,249,977- | chr11: 5,254,901- | |
| | | | | | 5,249,977 | 5,254,901 | |
| 165_-30_NA | 0.02% | 7 | 87.18% | False | chr11: 5,249,967- | chr11: 5,254,891- | HBG1/2 c. −110 to −139 |
| | | | | | 5,249,996 | 5,254,920 | |
| 167_-17_NA; | 0.02% | 1 | 87.20% | False; True | chr11: 5,249,969- | chr11: 5,254,893- | HBG1/2 c. −112 to −128; |
| 186_-5_NA | | | | | 5,249,985; | 5,254,909; | HBG1/2 c. −131 to −135 |
| | | | | | chr11: 5,249,988- | chr11: 5,254,912- | |
| | | | | | 5,249,992 | 5,254,916 | |
| 166_-11_NA; | 0.02% | 10 | 87.22% | False | chr11: 5,249,968- | chr11: 5,254,892- | HBG1/2 c. −111 to −121; |
| 180_-1_NA | | | | | 5,249,978; | 5,254,902; | HBG1/2 c. −125 to −125 |
| | | | | | chr11: 5,249,982- | chr11: 5,254,906- | |
| | | | | | 5,249,982 | 5,254,906 | |
| 162_-303_NA | 0.02% | 3 | 87.24% | True | chr11: 5,249,964- | chr11: 5,254,888- | HBG1/2 c. −107 to −409 |
| | | | | | 5,250,266 | 5,255,190 | |
| 166_-32_NA | 0.02% | 10 | 87.26% | False | chr11: 5,249,968- | chr11: 5,254,892- | HBG1/2 c. −111 to −142 |
| | | | | | 5,249,999 | 5,254,923 | |
| 165_-32_NA | 0.02% | 9 | 87.28% | False | chr11: 5,249,967- | chr11: 5,254,891- | HBG1/2 c. −110 to −141 |
| | | | | | 5,249,998 | 5,254,922 | |
| 144_-30_NA | 0.02% | 3 | 87.30% | False | chr11: 5,249,946- | chr11: 5,254,870- | HBG1/2 c. −89 to −118 |
| | | | | | 5,249,975 | 5,254,899 | |
| 158_-10_NA; | 0.02% | 3 | 87.32% | False | chr11: 5,249,960- | chr11: 5,254,884- | HBG1/2 c. −103 to −112; |
| 171_-2_NA | | | | | 5,249,969; | 5,254,893; | HBG1/2 c. −116 to −117 |
| | | | | | chr11: 5,249,973- | chr11: 5,254,897- | |
| | | | | | 5,249,974 | 5,254,898 | |
| 165_-4_NA; | 0.02% | 3 | 87.34% | False | chr11: 5,249,967- | chr11: 5,254,891- | HBG1/2 c. −110 to −113; |
| 172_-7_NA | | | | | 5,249,970; | 5,254,894; | HBG1/2 c. −117 to −123 |
| | | | | | chr11: 5,249,974- | chr11: 5,254,898- | |
| | | | | | 5,249,980 | 5,254,904 | |
| 167_-30_NA | 0.02% | 8 | 87.36% | False | chr11: 5,249,969- | chr11: 5,254,893- | HBG1/2 c. −112 to −141 |
| | | | | | 5,249,998 | 5,254,922 | |
| 169_-2_NA; | 0.02% | 3 | 87.37% | False | chr11: 5,249,971- | chr11: 5,254,895- | HBG1/2 c. −114 to −115; |
| 173_1_A | | | | | 5,249,972; | 5,254,896; | HBG1/2 c. −118 to −116 |
| | | | | | chr11: 5,249,975- | chr11: 5,254,899- | |
| | | | | | 5,249,973 | 5,254,897 | |
| 167_-2_NA; | 0.02% | 1 | 87.39% | False | chr11: 5,249,969- | chr11: 5,254,893- | HBG1/2 c. −112 to −113; |
| 170_4_GCAA | | | | | 5,249,970; | 5,254,894; | HBG1/2 c. −115 to −110 |
| | | | | | chr11: 5,249,972- | chr11: 5,254,896- | |
| | | | | | 5,249,967 | 5,254,891 | |
| 166_1_C; | 0.02% | 9 | 87.41% | False | chr11: 5,249,968- | chr11: 5,254,892- | HBG1/2 c. −111 to −109; |
| 167_-4_NA | | | | | 5,249,966; | 5,254,890; | HBG1/2 c. −112 to −115 |
| | | | | | chr11: 5,249,969- | chr11: 5,254,893- | |
| | | | | | 5,249,972 | 5,254,896 | |
| 170_-24_NA | 0.02% | 11 | 87.43% | False | chr11: 5,249,972- | chr11: 5,254,896- | HBG1/2 c. −115 to −138 |
| | | | | | 5,249,995 | 5,254,919 | |
| 167_-2_NA; | 0.02% | 10 | 87.44% | False | chr11: 5,249,969- | chr11: 5,254,893- | HBG1/2 c. −112 to −113; |
| 171_-3_NA | | | | | 5,249,970; | 5,254,894; | HBG1/2 c. −116 to −118 |
| | | | | | chr11: 5,249,973- | chr11: 5,254,897- | |
| | | | | | 5,249,975 | 5,254,899 | |
| 162_-10_NA; | 0.02% | 1 | 87.46% | False | chr11: 5,249,964- | chr11: 5,254,888- | HBG1/2 c. −107 to −116; |
| 177_1_T | | | | | 5,249,973; | 5,254,897; | HBG1/2 c. −122 to −120 |
| | | | | | chr11: 5,249,979- | chr11: 5,254,903- | |
| | | | | | 5,249,977 | 5,254,901 | |
| 124_-288_NA | 0.02% | 1 | 87.48% | True | chr11: 5,249,926- | chr11: 5,254,850- | HBG1/2 c. −69 to −356 |
| | | | | | 5,250,213 | 5,255,137 | |
| 159_-20_NA | 0.02% | 10 | 87.49% | False | chrll: 5,249,961- | chr11: 5,254,885- | HBG1/2 c. −104 to −123 |
| | | | | | 5,249,980 | 5,254,904 | |
| 161_-21_NA | 0.02% | 8 | 87.51% | False | chr11: 5,249,963- | chr11: 5,254,887- | HBG1/2 c. −106 to −126 |
| | | | | | 5,249,983 | 5,254,907 | |
| 160_-7_NA; | 0.02% | 1 | 87.53% | False | chr11: 5,249,962- | chr11: 5,254,886- | HBG1/2 c. −105 to −111; |
| 169_-2_NA; | | | | | 5,249,968; | 5,254,892; | HBG1/2 c. −114 to −115; |
| 173_-2_NA | | | | | chr11: 5,249,971- | chr11: 5,254,895- | HBG1/2 c. −118 to −119 |
| | | | | | 5,249,972; | 5,254,896; | |
| | | | | | chr11: 5,249,975- | chr11: 5,254,899- | |
| | | | | | 5,249,976 | 5,254,900 | |
| 156_-14_NA | 0.02% | 7 | 87.55% | False | chr11: 5,249,958- | chr11: 5,254,882- | HBG1/2 c. −101 to −114 |
| | | | | | 5,249,971 | 5,254,895 | |
| 159_-272_NA | 0.02% | 1 | 87.56% | True | chr11: 5,249,961- | chr11: 5,254,885- | HBG1/2 c. −104 to −375 |
| | | | | | 5,250,232 | 5,255,156 | |
| 166_-11_NA; | 0.02% | 6 | 87.58% | False; True | chr11: 5,249,968- | chr11: 5,254,892- | HBG1/2 c. −111 to −121; |
| 180_-4_NA | | | | | 5,249,978; | 5,254,902; | HBG1/2 c. −125 to −128 |
| | | | | | chr11: 5,249,982- | chr11: 5,254,906- | |
| | | | | | 5,249,985 | 5,254,909 | |
| 167_8_GAAAAATT; | 0.02% | 1 | 87.59% | False | chr11: 5,249,969- | chr11: 5,254,893- | HBG1/2 c. −112 to −103; |
| 170_-8_NA | | | | | 5,249,960; | 5,254,884; | HBG1/2 c. −115 to −122 |
| | | | | | chr11: 5,249,972- | chr11: 5,254,896- | |
| | | | | | 5,249,979 | 5,254,903 | |
| 166_-11_NA; | 0.02% | 2 | 87.61% | False | chr11: 5,249,968- | chr11: 5,254,892- | HBG1/2 c. −111 to −121; |
| 178_1_G | | | | | 5,249,978; | 5,254,902; | HBG1/2 c. −123 to −121 |
| | | | | | chr11: 5,249,980- | chr11: 5,254,904- | |
| | | | | | 5,249,978 | 5,254,902 | |
| 169_-8_NA; | 0.02% | 8 | 87.63% | False | chr11: 5,249,971- | chr11: 5,254,895- | HBG1/2 c. −114 to −121; |
| 180_-1_NA | | | | | 5,249,978; | 5,254,902; | HBG1/2 c. −125 to −125 |
| | | | | | chr11: 5,249,982- | chr11: 5,254,906- | |
| | | | | | 5,249,982 | 5,254,906 | |
| 158_-11_NA | 0.02% | 6 | 87.64% | False | chr11: 5,249,960- | chr11: 5,254,884- | HBG1/2 c. −103 to −113 |
| | | | | | 5,249,970 | 5,254,894 | |
| 173_1_T | 0.02% | 3 | 87.66% | False | chr11: 5,249,975- | chr11: 5,254,899- | HBG1/2 c. −118 to −116 |
| | | | | | 5,249,973 | 5,254,897 | |
| 168_-34_NA | 0.02% | 6 | 87.68% | False | chr11: 5,249,970- | chr11: 5,254,894- | HBG1/2 c. −113 to −146 |
| | | | | | 5,250,003 | 5,254,927 | |
| 172_-20_NA | 0.02% | 8 | 87.69% | True | chr11: 5,249,974- | chr11: 5,254,898- | HBG1/2 c. −117 to −136 |
| | | | | | 5,249,993 | 5,254,917 | |
| 166_-275_NA | 0.02% | 1 | 87.71% | False | chr11: 5,249,968- | chr11: 5,254,892- | HBG1/2 c. −111 to −385 |
| | | | | | 5,250,242 | 5,255,166 | |
| 156_-47_NA | 0.02% | 3 | 87.72% | False | chr11: 5,249,958- | chr11: 5,254,882- | HBG1/2 c. −101 to −147 |
| | | | | | 5,250,004 | 5,254,928 | |
| 168_-8_NA; | 0.02% | 2 | 87.74% | False | chr11: 5,249,970- | chr11: 5,254,894- | HBG1/2 c. −113 to −120; |
| 178_-2_NA | | | | | 5,249,977; | 5,254,901; | HBG1/2 c. −123 to −124 |
| | | | | | chr11: 5,249,980- | chr11: 5,254,904- | |
| | | | | | 5,249,981 | 5,254,905 | |
| 164_-31_NA | 0.02% | 6 | 87.75% | False | chr11: 5,249,966- | chr11: 5,254,890- | HBG1/2 c. −109 to −139 |
| | | | | | 5,249,996 | 5,254,920 | |
| 159_-318_NA | 0.02% | 2 | 87.77% | True | chr11: 5,249,961- | chr11: 5,254,885- | HBG1/2 c. −104 to −421 |
| | | | | | 5,250,278 | 5,255,202 | |
| 166_-1_NA; | 0.01% | 1 | 87.78% | False | chr11: 5,249,968- | chr11: 5,254,892- | HBG1/2 c. −111 to −111; |
| 168_-230_NA | | | | | 5,249,968; | 5,254,892; | HBG1/2 c. −113 to −342 |
| | | | | | chr11: 5,249,970- | chr11: 5,254,894- | |
| | | | | | 5,250,199 | 5,255,123 | |
| 111_-260_NA | 0.01% | 1 | 87.80% | False | chr11: 5,249,913- | chr11: 5,254,837- | HBG1/2 c. −56 to −315 |
| | | | | | 5,250,172 | 5,255,096 | |
| 166_-272_NA | 0.01% | 6 | 87.81% | True | chr11: 5,249,968- | chr11: 5,254,892- | HBG1/2 c. −111 to −382 |
| | | | | | 5,250,239 | 5,255,163 | |
| 166_-4_NA; | 0.01% | 4 | 87.83% | False | chr11: 5,249,968- | chr11: 5,254,892- | HBG1/2 c. −111 to −114; |
| 171_2_AC | | | | | 5,249,971; | 5,254,895; | HBG1/2 c. −116 to −113 |
| | | | | | chr11: 5,249,973- | chr11: 5,254,897- | |
| | | | | | 5,249,970 | 5,254,894 | |
| 164_-3_NA; | 0.01% | 1 | 87.84% | False | chr11: 5,249,966- | chr11: 5,254,890- | HBG1/2 c. −109 to −111; |
| 171_3_GGC | | | | | 5,249,968; | 5,254,892; | HBG1/2 c. −116 to −112 |
| | | | | | chr11: 5,249,973- | chr11: 5,254,897- | |
| | | | | | 5,249,969 | 5,254,893 | |
| 166_-10_NA; | 0.01% | 4 | 87.86% | False | chr11: 5,249,968- | chr11: 5,254,892- | HBG1/2 c. −111 to −120; |
| 178_-1_NA | | | | | 5,249,977; | 5,254,901; | HBG1/2 c. −123 to −123 |
| | | | | | chr11: 5,249,980- | chr11: 5,254,904- | |
| | | | | | 5,249,980 | 5,254,904 | |
| 167_-307_NA | 0.01% | 1 | 87.87% | False | chr11: 5,249,969- | chr11: 5,254,893- | HBG1/2 c. −112 to −418 |
| | | | | | 5,250,275 | 5,255,199 | |
| 165_-308_NA | 0.01% | 2 | 87.88% | False | chr11: 5,249,967- | chr11: 5,254,891- | HBG1/2 c. −110 to −417 |
| | | | | | 5,250,274 | 5,255,198 | |
| 158_-2_NA; | 0.01% | 1 | 87.90% | False | chr11: 5,249,960- | chr11: 5,254,884- | HBG1/2 c. −103 to −104; |
| 162_-9_NA | | | | | 5,249,961; | 5,254,885; | HBG1/2 c. −107 to −115 |
| | | | | | chr11: 5,249,964- | chr11: 5,254,888- | |
| | | | | | 5,249,972 | 5,254,896 | |
| 155_-22_NA; | 0.01% | 1 | 87.91% | False | chr11: 5,249,957- | chr11: 5,254,881- | HBG1/2 c. −100 to −121; |
| 182_-1_NA | | | | | 5,249,978; | 5,254,902; | HBG1/2 c. −127 to −127 |
| | | | | | chr11: 5,249,984- | chr11: 5,254,908- | |
| | | | | | 5,249,984 | 5,254,908 | |
| 138_-32_NA; | 0.01% | 1 | 87.92% | False | chr11: 5,249,940- | chr11: 5,254,864- | HBG1/2 c. −83 to −114; |
| 174_-3_NA | | | | | 5,249,971; | 5,254,895; | HBG1/2 c. −119 to −121 |
| | | | | | chr11: 5,249,976- | chr11: 5,254,900- | |
| | | | | | 5,249,978 | 5,254,902 | |
| 140_-52_NA | 0.01% | 2 | 87.94% | False | chr11: 5,249,942- | chr11: 5,254,866- | HBG1/2 c. −85 to −136 |
| | | | | | 5,249,993 | 5,254,917 | |
| 155_-22_NA | 0.01% | 5 | 87.95% | False | chr11: 5,249,957- | chr11: 5,254,881- | HBG1/2 c. −100 to −121 |
| | | | | | 5,249,978 | 5,254,902 | |
| 166_-5_NA; | 0.01% | 1 | 87.96% | False | chr11: 5,249,968- | chr11: 5,254,892- | HBG1/2 c. −111 to −115; |
| 174_-8_NA; | | | | | 5,249,972; | 5,254,896; | HBG1/2 c. −119 to −126; |
| 184_-1_NA | | | | | chr11: 5,249,976- | chr11: 5,254,900- | HBG1/2 c. −129 to −129 |
| | | | | | 5,249,983; | 5,254,907; | |
| | | | | | chr11: 5,249,986- | chr11: 5,254,910- | |
| | | | | | 5,249,986 | 5,254,910 | |
| 164_-8_NA; | 0.01% | 5 | 87.97% | False | chr11: 5,249,966- | chr11: 5,254,890- | HBG1/2 c. −109 to −116; |
| 175_-3_NA | | | | | 5,249,973; | 5,254,897; | HBG1/2 c. −120 to −122 |
| | | | | | chr11: 5,249,977- | chr11: 5,254,901- | |
| | | | | | 5,249,979 | 5,254,903 | |
| 150_-10_NA; | 0.01% | 1 | 87.99% | False; True | chr11: 5,249,952- | chr11: 5,254,876- | HBG1/2 c. −95 to −104; |
| 162_-7_NA | | | | | 5,249,961; | 5,254,885; | HBG1/2 c. −107 to −113 |
| | | | | | chr11: 5,249,964- | chr11: 5,254,888- | |
| | | | | | 5,249,970 | 5,254,894 | |
| 151_-37_NA | 0.01% | 6 | 88.00% | False | chr11: 5,249,953- | chr11: 5,254,877- | HBG1/2 c. −96 to −132 |
| | | | | | 5,249,989 | 5,254,913 | |
| 156_-270_NA | 0.01% | 1 | 88.01% | True | chr11: 5,249,958- | chr11: 5,254,882- | HBG1/2 c. −101 to −370 |
| | | | | | 5,250,227 | 5,255,151 | |
| 144_-47_NA | 0.01% | 4 | 88.02% | False | chr11: 5,249,946- | chr11: 5,254,870- | HBG1/2 c. −89 to −135 |
| | | | | | 5,249,992 | 5,254,916 | |
| 79_-340_NA | 0.01% | 1 | 88.03% | True | chr11: 5,249,881- | chr11: 5,254,805- | HBG1/2 c. −24 to −363 |
| | | | | | 5,250,220 | 5,255,144 | |
| 166_2_CA; | 0.01% | 3 | 88.05% | False | chr11: 5,249,968- | chr11: 5,254,892- | HBG1/2 c. −111 to −108; |
| 167_-4_NA | | | | | 5,249,965; | 5,254,889; | HBG1/2 c. −112 to −115 |
| | | | | | chr11: 5,249,969- | chr11: 5,254,893- | |
| | | | | | 5,249,972 | 5,254,896 | |
| 147_-25_NA | 0.01% | 4 | 88.06% | False | chr11: 5,249,949- | chr11: 5,254,873- | HBG1/2 c. −92 to −116 |
| | | | | | 5,249,973 | 5,254,897 | |
| 168_-7_NA; | 0.01% | 3 | 88.07% | False | chr11: 5,249,970- | chr11: 5,254,894- | HBG1/2 c. −113 to −119; |
| 176_1_A | | | | | 5,249,976; | 5,254,900; | HBG1/2 c. −121 to −119 |
| | | | | | chr11: 5,249,978- | chr11: 5,254,902- | |
| | | | | | 5,249,976 | 5,254,900 | |
| 168_-1_NA; | 0.01% | 1 | 88.08% | False | chr11: 5,249,970- | chr11: 5,254,894- | HBG1/2 c. −113 to −113; |
| 170_-66_NA | | | | | 5,249,970; | 5,254,894; | HBG1/2 c. −115 to −180 |
| | | | | | chr11: 5,249,972- | chr11: 5,254,896- | |
| | | | | | 5,250,037 | 5,254,961 | |
| 162_-3_NA; | 0.01% | 2 | 88.09% | False | chr11: 5,249,964- | chr11: 5,254,888- | HBG1/2 c. −107 to −109; |
| 167_-9_NA | | | | | 5,249,966; | 5,254,890; | HBG1/2 c. −112 to −120 |
| | | | | | chr11: 5,249,969- | chr11: 5,254,893- | |
| | | | | | 5,249,977 | 5,254,901 | |
| 124_-267_NA | 0.01% | 1 | 88.10% | True | chr11: 5,249,926- | chr11: 5,254,850- | HBG1/2 c. −69 to −335 |
| | | | | | 5,250,192 | 5,255,116 | |
| 156_-9_NA; | 0.01% | 1 | 88.11% | False | chr11: 5,249,958- | chr11: 5,254,882- | HBG1/2 c. −101 to −109; |
| 169_-1_NA; | | | | | 5,249,966; | 5,254,890; | HBG1/2 c. −114 to −114; |
| 175_-1_NA | | | | | chr11: 5,249,971- | chr11: 5,254,895- | HBG1/2 c. −120 to −120 |
| | | | | | 5,249,971; | 5,254,895; | |
| | | | | | chr11: 5,249,977- | chr11: 5,254,901- | |
| | | | | | 5,249,977 | 5,254,901 | |
| 159_4_TGAC; | 0.01% | 1 | 88.12% | False | chr11: 5,249,961- | chr11: 5,254,885- | HBG1/2 c. −104 to −99; |
| 162_-3_NA; | | | | | 5,249,956; | 5,254,880; | HBG1/2 c. −107 to −109; |
| 167_3_GCC | | | | | chr11: 5,249,964- | chr11: 5,254,888- | HBG1/2 c. −112 to −108 |
| | | | | | 5,249,966; | 5,254,890; | |
| | | | | | chr11: 5,249,969- | chr11: 5,254,893- | |
| | | | | | 5,249,965 | 5,254,889 | |
| 169_-1_NA; | 0.01% | 5 | 88.13% | False | chr11: 5,249,971- | chr11: 5,254,895- | HBG1/2 c. −114 to −114; |
| 173_-3_NA | | | | | 5,249,971; | 5,254,895; | HBG1/2 c. −118 to −120 |
| | | | | | chr11: 5,249,975- | chr11: 5,254,899- | |
| | | | | | 5,249,977 | 5,254,901 | |
| 152_-19_NA; | 0.01% | 1 | 88.14% | False | chr11: 5,249,954- | chr11: 5,254,878- | HBG1/2 c. −97 to −115; |
| 176_-2_NA | | | | | 5,249,972; | 5,254,896; | HBG1/2 c. −121 to −122 |
| | | | | | chr11: 5,249,978- | chr11: 5,254,902- | |
| | | | | | 5,249,979 | 5,254,903 | |
| 42_-176_NA | 0.01% | 2 | 88.15% | False | chr11: 5,249,844- | chr11: 5,254,768- | HBG1/2 c. 13 to −162 |
| | | | | | 5,250,019 | 5,254,943 | |
| 169_-37_NA | 0.01% | 1 | 88.16% | True | chr11: 5,249,971- | chr11: 5,254,895- | HBG1/2 c. −114 to −150 |
| | | | | | 5,250,007 | 5,254,931 | |
| 159_-301_NA | 0.01% | 1 | 88.17% | True | chr11: 5,249,961- | chr11: 5,254,885- | HBG1/2 c. −104 to −404 |
| | | | | | 5,250,261 | 5,255,185 | |
| 169_-64_NA | 0.01% | 5 | 88.18% | True | chr11: 5,249,971- | chr11: 5,254,895- | HBG1/2 c. −114 to −177 |
| | | | | | 5,250,034 | 5,254,958 | |
| 147_-41_NA | 0.01% | 2 | 88.19% | False | chr11: 5,249,949- | chr11: 5,254,873- | HBG1/2 c. −92 to −132 |
| | | | | | 5,249,989 | 5,254,913 | |
| 140_-31_NA; | 0.01% | 1 | 88.20% | False | chr11: 5,249,942- | chr11: 5,254,866- | HBG1/2 c. −85 to −115; |
| 177_-1_NA | | | | | 5,249,972; | 5,254,896; | HBG1/2 c. −122 to −122 |
| | | | | | chr11: 5,249,979- | chr11: 5,254,903- | |
| | | | | | 5,249,979 | 5,254,903 | |
| 170_-1_NA; | 0.01% | 2 | 88.21% | False | chr11: 5,249,972- | chr11: 5,254,896- | HBG1/2 c. −115 to −115; |
| 172_-303_NA | | | | | 5,249,972; | 5,254,896; | HBG1/2 c. −117 to −419 |
| | | | | | chr11: 5,249,974- | chr11: 5,254,898- | |
| | | | | | 5,250,276 | 5,255,200 | |
| 166_-4_NA; | 0.01% | 1 | 88.22% | False | chr11: 5,249,968- | chr11: 5,254,892- | HBG1/2 c. −111 to −114; |
| 172_-21_NA | | | | | 5,249,971; | 5,254,895; | HBG1/2 c. −117 to −137 |
| | | | | | chr11: 5,249,974- | chr11: 5,254,898- | |
| | | | | | 5,249,994 | 5,254,918 | |
| 166_-7_NA; | 0.01% | 1 | 88.23% | False | chr11: 5,249,968- | chr11: 5,254,892- | HBG1/2 c. −111 to −117; |
| 177_2_CC | | | | | 5,249,974; | 5,254,898; | HBG1/2 c. −122 to −119 |
| | | | | | chr11: 5,249,979- | chr11: 5,254,903- | |
| | | | | | 5,249,976 | 5,254,900 | |
| 152_-254_NA | 0.01% | 1 | 88.23% | True | chr11: 5,249,954- | chr11: 5,254,878- | HBG1/2 c. −97 to −350 |
| | | | | | 5,250,207 | 5,255,131 | |
| 165_-4_NA; | 0.01% | 3 | 88.24% | False; True | chr11: 5,249,967- | chr11: 5,254,891- | HBG1/2 c. −110 to −113; |
| 172_-5_NA | | | | | 5,249,970; | 5,254,894; | HBG1/2 c. −117 to −121 |
| | | | | | chr11: 5,249,974- | chr11: 5,254,898- | |
| | | | | | 5,249,978 | 5,254,902 | |
| 174_-13_NA | 0.01% | 5 | 88.25% | False | chr11: 5,249,976- | chr11: 5,254,900- | HBG1/2 c. −119 to −131 |
| | | | | | 5,249,988 | 5,254,912 | |
| 154_-17_NA; | 0.01% | 1 | 88.26% | False | chr11: 5,249,956- | chr11: 5,254,880- | HBG1/2 c. −99 to −115; |
| 175_-6_NA | | | | | 5,249,972; | 5,254,896; | HBG1/2 c. −120 to −125 |
| | | | | | chr11: 5,249,977- | chr11: 5,254,901- | |
| | | | | | 5,249,982 | 5,254,906 | |
| 161_-9_NA; | 0.01% | 1 | 88.27% | False; True | chr11: 5,249,963- | chr11: 5,254,887- | HBG1/2 c. −106 to −114; |
| 172_-20_NA | | | | | 5,249,971; | 5,254,895; | HBG1/2 c. −117 to −136 |
| | | | | | chr11: 5,249,974- | chr11: 5,254,898- | |
| | | | | | 5,249,993 | 5,254,917 | |
| 132_-42_NA | 0.01% | 1 | 88.28% | False | chr11: 5,249,934- | chr11: 5,254,858- | HBG1/2 c. −77 to −118 |
| | | | | | 5,249,975 | 5,254,899 | |
| 162_-259_NA | 0.01% | 2 | 88.29% | False | chr11: 5,249,964- | chr11: 5,254,888- | HBG1/2 c. −107 to −365 |
| | | | | | 5,250,222 | 5,255,146 | |
| 166_-18_NA | 0.01% | 2 | 88.29% | True | chr11: 5,249,968- | chr11: 5,254,892- | HBG1/2 c. −111 to −128 |
| | | | | | 5,249,985 | 5,254,909 | |
| 145_-25_NA | 0.01% | 1 | 88.30% | False | chr11: 5,249,947- | chrll: 5,254,871- | HBG1/2 c. −90 to −114 |
| | | | | | 5,249,971 | 5,254,895 | |
| 148_-29_NA | 0.01% | 1 | 88.31% | False | chr11: 5,249,950- | chr11: 5,254,874- | HBG1/2 c. −93 to −121 |
| | | | | | 5,249,978 | 5,254,902 | |
| 144_-327_NA | 0.01% | 1 | 88.32% | False | chr11: 5,249,946- | chr11: 5,254,870- | HBG1/2 c. −89 to −415 |
| | | | | | 5,250,272 | 5,255,196 | |
| 169_-274_NA | 0.01% | 1 | 88.33% | False | chr11: 5,249,971- | chr11: 5,254,895- | HBG1/2 c. −114 to −387 |
| | | | | | 5,250,244 | 5,255,168 | |

The Indel_id is a string identifying the indel, shown as indel_start_position +_+ indel_length +_+ ID. Where ID is NA for deletions and for insertions is the sequence inserted. Positive values indicate insertions and negative values indicate deletions.
The average percentage (“AVE % in indel”) is the average percentage of each indel_ID amongst all indels detected in a sample. The average is calculated from n = 14 samples.
“Cts” = counts and provides the number of samples in which the indel was identified.
“Cum. Sum” = Cumulative sum and the cumulative percentage of indels, e.g. the top ten most abuntant indels account for 45.03% of all indels.
In the column labeled MMEJ, “True” indicates the repair was mediated via MMEJ, and “False” indicates the repair was mediated via NHEJ.
The genomic coordinates at HBG1 or HBG2 are reported using the One-based coordinate system, “Homo sapiens chromosome 11, GRCh38.p12 Primary Assembly,” (Version NC_000011.10), NCBI Reference Sequence NC_000011.
The HBG1/2 position indicates the deletion relative to the TSS.

### SEQUENCES

[0591] Genome editing system components according to the present disclosure (including without limitation, RNA-guided nucleases, guide RNAs, donor template nucleic acids, nucleic acids encoding nucleases or guide RNAs, and portions or fragments of any of the foregoing), are exemplified by the nucleotide and amino acid sequences presented in the Sequence Listing. The sequences presented in the Sequence Listing are not intended to be limiting, but rather illustrative of certain principles of genome editing systems and their component parts, which, in combination with the instant disclosure, will inform those of skill in the art about additional implementations and modifications that are within the scope of this disclosure. A list of the sequences presented is provided in the following Table 25.

TABLE 25
Sequences presented in the Sequence Listing:

| SEQ ID NOS: | DESCRIPTION |
|---|---|
| 1-2, 4-6, | Cas9 polypeptides |
| 12, 14 | |
| 3, 7-11, 13 | Cas9 coding sequences |
| 15-23, | Cas9 RuvC-like domains |
| 52-123 | |
| 24-28, | Cas9 HNH-like domains |
| 124-198 | |
| 29-31, 38-51 | Full-length modular and |
| | unimolecular gRNAs |
| 32-37 | gRNA proximal and tail domains |
| 199-205 | PAM sequences |
| 251-901, 1002 | gRNA targeting domains (RNA)- |
| | see Table 2, 19, 22, 23 |
| 910-919, 943- | gRNA targeting domains (DNA)- |
| 945, 956-959, | see Tables 7, 9 |
| 1003 | |
| 920-929, 946- | gRNA targeting domains plus PAM |
| 948, 960-963, | (NGG) (RNA) - see Tables 7, 9 |
| 1004 | |
| 930-939, 949- | gRNA targeting domains plus PAM |
| 951, 964-967, | (NGG) (DNA) - see Tables 7, 9 |
| 1005 | |
| 970, 971, 996, | gRNA sequences (DNA)- see Tables |
| 997 | 10, 12 |
| 972, 973, 998, | gRNA sequences (DNA)- see Tables |
| 999 | 10, 12 |
| 902, 903 | Human HBG1 and HBG2 promoter |
| | sequences including HPFH deletion |
| | site |
| 904-909, | Oligonucleotide donor sequences |
| 974-995 | and homology arms - see Tables 8, |
| | 11 |
| 968-969 | BCL11Ae sequences |
| 1006, 1007 | Nuclear Localization Signal |
| | sequences |
| 1000, 1001, | Cpf1 polypeptide sequences |
| 1008-1018 | |
| 1032-1039 | |
| 1094-1097, | |
| 1107-1109 | |
| 1019-1021 | Cpf1 nucleotide sequences |
| 1110-1117 | |

### INCORPORATION BY REFERENCE

[0592] All publications, patents, and patent applications mentioned herein are hereby incorporated by reference in their entirety as if each individual publication, patent or patent application was specifically and individually indicated to be incorporated by reference. In case of conflict, the present application, including any definitions herein, will control.

### EQUIVALENTS

[0593] Those skilled in the art will recognize, or be able to ascertain using no more than routine experimentation, many equivalents to the specific embodiments described herein. Such equivalents are intended to be encompassed by the following claims.

### REFERENCES

[0594] Ahern et al., Br J Haematol 25(4):437-444 (1973)
[0595] Akinbami Hemoglobin 40:64-65 (2016)
[0596] Aliyu et al. Am J Hematol 83:63-70 (2008)
[0597] Anders et al. Nature 513(7519):569-573 (2014)
[0598] Angastiniotis & Modell Ann N Y Acad Sci 850:251-269 (1998)
[0599] Bae et al. Bioinformatics 30(10):1473-1475 (2014)
[0600] Barbosa et al. Braz J Med Bio Res 43(8):705-711 (2010)
[0601] Bauer et al. Nat. Med. 25(5):776-783 (2019)
[0602] Bothmer et al. CRISPR J 3(3):177-187 (2020)
[0603] Bouva Hematologica 91(1):129-132 (2006)
[0604] Briner et al. Mol Cell 56(2):333-339 (2014)
[0605] Brousseau Am J Hematol 85(1):77-78 (2010)
[0606] Caldecott Nat Rev Genet 9(8):619-631 (2008)
[0607] Canvers et al. Nature 527(12):192-197 (2015)
[0608] Chang et al. Mol Ther Methods Clin Dev 4:137-148 (2017)
[0609] Chassanidis Ann Hematol 88(6):549-555 (2009)
[0610] Chylinski et al. RNA Biol 10(5):726-737 (2013)
[0611] Cong et al. Science 399(6121):819-823 (2013)
[0612] Costa et al., Cad Saude Publica 18(5):1469-1471 (2002)
[0613] Davis & Maizels 2 Proc Natl Acad Sci USA 111(10):E924-932 (2014)
[0614] Fine et al. Sci Rep. 5:10777 (2015)
[0615] Frit et al. DNA Repair (Amst) 17:81-97 (2014)
[0616] Fu et al. Nat Biotechnol 32:279-284 (2014)
[0617] Gao et al. Nat Biotechnol.: 35(8):789-792 (2017)
[0618] Giarratana et al. Blood:118, 5071-5079 (2011)
[0619] Guilinger et al. Nat Biotechnol 32:577-582 (2014)
[0620] Heigwer et al. Nat Methods 11(2):122-123 (2014)
[0621] Hsu et al. Nat Biotechnol 31(9):827-832 (2013)
[0622] Iyama & Wilson DNA Repair (Amst) 12(8):620-636 (2013)
[0623] Jiang et al. Nat Biotechnol 31(3):233-239 (2013)
[0624] Jinek et al. Science 337(6096):816-821 (2012)
[0625] Jinek et al. Science 343(6176):1247997 (2014)
[0626] Kleinstiver et al. Nature 523(7561):481-485 (2015a)
[0627] Kleinstiver et al. Nat Biotechnol 33(12):1293-1298 (2015b)
[0628] Kleinstiver et al. Nature 529(7587):490-495 (2016)
[0629] Kleinstiver et al. Nat Biotechnol 37(3):276-282 (2019)
[0630] Komor et al. Nature 533(7603):420-424 (2016)
[0631] Lee et al. Nano Lett 12(12):6322-6327 (2012)
[0632] Lewis “Medical-Surgical Nursing: Assessment and Management of Clinical Problems” (2014)
[0633] Li Cell Res 18(1):85-98 (2008)
[0634] Makarova et al. Nat Rev Microbiol 9(6):467-477 (2011)
[0635] Mali et al. Science 339(6121):823-826 (2013)
[0636] Mantovani et al. Nucleic Acids Res 16(16):7783-7797 (1988)
[0637] Marteijn et al. Nat Rev Mol Cell Biol 15(7):465-481 (2014)
[0638] Martyn et al., Biochim Biophys Acta 1860(5):525-536 (2017)
[0639] Métais et al. Blood Adv. 3(21):3379-92 (2019)
[0640] Nishimasu et al. Cell 156(5):935-949 (2014)
[0641] Nishimasu et al. Cell 162:1113-1126 (2015)
[0642] Notta et al. Science 333(6039):218-21 (2011)
[0643] Pausch et al. Science 369(6501):333-337 (2020)
[0644] Ran & Hsu Cell 154(6):1380-1389 (2013)
[0645] Richardson et al. Nat Biotechnol 34:339-344 (2016)
[0646] Swarts et al. May 22:e1481. doi: 10.1002/wma.1481. Epub ahead of print. PMID: 29790280 (2018)
[0647] Shmakov et al. Molecular Cell 60(3):385-397 (2015)
[0648] Sternberg et al. Nature 507(7490):62-67 (2014)
[0649] Strohkendl et al. Mol. Cell 71:816-824 (2018)
[0650] Superti-Furga et al. EMBO J 7(10):3099-3107 (1988)
[0651] Them Hum Mol Genet 18(R2):R216-223 (2009)
[0652] Thorpe et al. Br J Haematol. 87(1):125-132 (1994)
[0653] Tsai et al. Nat Biotechnol 34(5): 483 (2016)
[0654] Waber et al. Blood 67(2):551-554 (1986)
[0655] Wang et al. Cell 153(4):910-918 (2013)
[0656] Weber et al. Sci Adv. 6(7):eaay9392 (2020)
[0657] Wu et al. Nat. Med. 25(5): 776-83 (2019)
[0658] Xiao et al. Bioinformatics 30(8):1180-1182 (2014)
[0659] Xu et al. Genes Dev 24(8):783-798 (2010)
[0660] Yamano et al. Cell 165(4): 949-962 (2016)
[0661] Zetsche et al. Nat Biotechnol 33(2):139-42 (2015)

The following is a complete listing of the claims pending in the application, as amended:

1. A first population of modified cells comprising
a plurality of modified CD34+ or hematopoietic stem cells,
one or more of the plurality of modified cells having an indel in an HBG gene promoter,
the plurality of modified cells as a whole including a HBG1/2 c.−104 to −121 deletion in a HBG1 promoter, a HBG2 promoter, or a combination thereof, and
the HBG1/2 c.−104 to −121 deletion making up 2% or more of the indels in the plurality of modified cells as a whole.

2. The first population of modified cells of claim 1, wherein the HBG1/2 c.−104 to −121 deletion makes up less than 25% of the indels in the plurality of modified cells as a whole.

3. (canceled)

4. The first population of modified cells of claim 1, produced by a process comprising delivering a first RNP complex including a first guide RNA (gRNA) and a Cpf1 RNA-guided nuclease or a modified Cpf1 RNA-guided nuclease to a first population of unmodified cells comprising a plurality of unmodified CD34+ or hematopoietic stem cells to generate the indels, the first gRNA including a first gRNA targeting domain.

5-7. (canceled)

8. The first population of modified cells of claim 1, wherein 50% or more of the indels in the plurality of modified cells as a whole are deletions between 1 base pair and 25 base pairs.

9. The first population of modified cells of claim 1, wherein 50% or more of the indels in the plurality of modified cells as a whole are deletions between 3 base pairs and 25 base pairs.

10. The first population of modified cells of claim 1, wherein 50% or more of the indels in the plurality of modified cells as a whole are deletions between 4 base pairs and 25 base pairs.

11. The first population of modified cells of claim 1, wherein 50% or more of the indels in the plurality of modified cells as a whole are deletions between 5 base pairs and 25 base pairs.

12. The first population of modified cells of claim 1, wherein the plurality of modified cells as a whole comprise the following deletions:
a HBG1/2 c.−104 to −121 deletion in a HBG1 promoter, HBG2 promoter, or a combination thereof, the HBG1/2 c.−104 to −121 deletion making up 2% or more of the indels in the plurality of modified cells as a whole; and
a HBG1/2 c.−110 to −115 deletion in a HBG1 promoter, HBG2 promoter, or a combination thereof, the HBG1/2 c.−110 to −115 deletion making up 2% or more of the indels in the plurality of modified cells as a whole.

13. The first population of modified cells of claim 1, wherein the plurality of modified cells as a whole comprise one or more deletions selected from the group consisting of:
a HBG1/2 c.−104 to −121 deletion in a HBG1 promoter, HBG2 promoter, or a combination thereof, the HBG1/2 c.−104 to −121 deletion making up 1% to 15.5% of the indels in the plurality of modified cells as a whole;
a HBG1/2 c.−110 to −115 deletion in a HBG1 promoter, HBG2 promoter, or a combination thereof, the HBG1/2 c.−110 to −115 deletion making up 1% to 6% of the indels in the plurality of modified cells as a whole;
a HBG1/2 c.−112 to −115 deletion in a HBG1 promoter, HBG2 promoter, or a combination thereof, the HBG1/2 c.−112 to −115 deletion making up 1% to 6% of the indels in the plurality of modified cells as a whole;
a HBG1/2 c.−113 to −115 deletion in a HBG1 promoter, HBG2 promoter, or a combination thereof, the HBG1/2 c.−113 to −115 deletion making up 1% to 6% of the indels in the plurality of modified cells as a whole;
a HBG1/2 c.−111 to −115 deletion in a HBG1 promoter, HBG2 promoter, or a combination thereof, the HBG1/2 c.−111 to −115 deletion making up 1% to 6% of the indels in the plurality of modified cells as a whole;
a HBG1/2 c.−111 to −117 deletion in a HBG1 promoter, HBG2 promoter, or a combination thereof, the HBG1/2 c.−111 to −117 deletion making up 1% to 6% of the indels in the plurality of modified cells as a whole;
a HBG1/2 c.−102 to −114 deletion in a HBG1 promoter, HBG2 promoter, or a combination thereof, the HBG1/2 c.−102 to −114 deletion making up 1% to 6% of the indels in the plurality of modified cells as a whole;
a HBG1/2 c.−114 to −118 deletion in a HBG1 promoter, HBG2 promoter, or a combination thereof, the HBG1/2 c.−114 to −118 deletion making up 1% to 6% of the indels in the plurality of modified cells as a whole;
a HBG1/2 c.−112 to −116 deletion in a HBG1 promoter, HBG2 promoter, or a combination thereof, the HBG1/2 c.−112 to −116 deletion making up 1% to 6% of the indels in the plurality of modified cells as a whole; and
a HBG1/2 c.−113 to −117 deletion in a HBG1 promoter, HBG2 promoter, or a combination thereof, the HBG1/2 c.−113 to −117 deletion making up 1% to 6% of the indels in the plurality of modified cells as a whole.

14-18. (canceled)

19. The first population of modified cells of claim 4, wherein the first RNP complex is delivered to the first population of unmodified cells by electroporation.

20. (canceled)

21. The first population of modified cells of claim 1, wherein the first population of unmodified cells is from a subject having sickle cell disease or beta-thallasemia.

22-24. (canceled)

25. The first population of modified cells of claim 4, the first gRNA including a 5′ end and a 3′ end, a DNA extension at the 5′ end, and a 2′-O-methyl-3′-phosphorothioate modification at the 3′ end.

26. The first population of modified cells of claim 25, wherein the DNA extension comprises a sequence set forth in SEQ ID NOs:1235-1250.

27. The first population of modified cells of claim 4, wherein the first gRNA targeting domain comprises SEQ ID NO:1254.

28. The first population of modified cells of claim 4, wherein the gRNA comprises SEQ ID NO:1051.

29. The first population of modified cells of claim 4, wherein the modified Cpf1 comprises SEQ ID NO:1097.

30. The first population of modified cells of claim 1, wherein the indel in the HBG gene promoter is in a CCAAT box target region.

31-44. (canceled)

The application's sequence listing, which the Patent Office published only in electronic form, follows.

SEQUENCE LISTING (1276 sequences)

SEQ ID NO: 1 - protein, 1345 aa, Streptococcus mutans
  misc_feature (10)..(21): N-terminal RuvC-like domain
  misc_feature (759)..(766): RuvC-like domain
  misc_feature (837)..(863): HNH-like domain
  misc_feature (982)..(989): RuvC-like domain
MKKPYSIGLDIGTNSVGWAVVTDDYKVPAKKMKVLGNTDKSHIEKNLLGALLFDSGNTAEDRRLKRTARRRYTRRRNRILYLQEIFSEEMGKVDDSFFHRLEDSFLVTEDKRGERHPIFGNLEEEVKYHENFPTIYHLRQYLADNPEKVDLRLVYLALAHIIKFRGHFLIEGKFDTRNNDVQRLFQEFLAVYDNTFENSSLQEQNVQVEEILTDKISKSAKKDRVLKLFPNEKSNGRFAEFLKLIVGNQADFKKHFELEEKAPLQFSKDTYEEELEVLLAQIGDNYAELFLSAKKLYDSILLSGILTVTDVGTKAPLSASMIQRYNEHQMDLAQLKQFIRQKLSDKYNEVFSDVSKDGYAGYIDGKTNQEAFYKYLKGLLNKIEGSGYFLDKIEREDFLRKQRTFDNGSIPHQIHLQEMRAIIRRQAEFYPFLADNQDRIEKLLTFRIPYYVGPLARGKSDFAWLSRKSADKITPWNFDEIVDKESSAEAFINRMTNYDLYLPNQKVLPKHSLLYEKFTVYNELTKVKYKTEQGKTAFFDANMKQEIFDGVFKVYRKVTKDKLMDFLEKEFDEFRIVDLTGLDKENKVFNASYGTYHDLCKILDKDFLDNSKNEKILEDIVLTLTLFEDREMIRKRLENYSDLLTKEQVKKLERRHYTGWGRLSAELIHGIRNKESRKTILDYLIDDGNSNRNFMQLINDDALSFKEEIAKAQVIGETDNLNQVVSDIAGSPAIKKGILQSLKIVDELVKIMGHQPENIVVEMARENQFTNQGRRNSQQRLKGLTDSIKEFGSQILKEHPVENSQLQNDRLFLYYLQNGRDMYTGEELDIDYLSQYDIDHIIPQAFIKDNSIDNRVLTSSKENRGKSDDVPSKDVVRKMKSYWSKLLSAKLITQRKFDNLTKAERGGLTDDDKAGFIKRQLVETRQITKHVARILDERFNTETDENNKKIRQVKIVTLKSNLVSNFRKEFELYKVREINDYHHAHDAYLNAVIGKALLGVYPQLEPEFVYGDYPHFHGHKENKATAKKFFYSNIMNFFKKDDVRTDKNGEIIWKKDEHISNIKKVLSYPQVNIVKKVEEQTGGFSKESILPKGNSDKLIPRKTKKFYWDTKKYGGFDSPIVAYSILVIADIEKGKSKKLKTVKALVGVTIMEKMTFERDPVAFLERKGYRNVQEENIIKLPKYSLFKLENGRKRLLASARELQKGNEIVLPNHLGTLLYHAKNIHKVDEPKHLDYVDKHKDEFKELLDVVSNFSKKYTLAEGNLEKIKELYAQNNGEDLKELASSFINLLTFTAIGAPATFKFFDKNIDRKRYTSTTEILNATLIHQSITGLYETRIDLNKLGGD

SEQ ID NO: 2 - protein, 1368 aa, Streptococcus pyogenes [sequence omitted]

SEQ ID NO: 3 - DNA, 4107 bp, Streptococcus pyogenes
atggataaaaagtacagcatcgggctggacatcggtacaaactcagtggggtgggccgtgattacggacgagtacaaggtaccctccaaaaaatttaaagtgctgggtaacacggacagacactctataaagaaaaatcttattggagccttgctgttcgactcaggcgagacagccgaagccacaaggttgaagcggaccgccaggaggcggtataccaggagaaagaaccgcatatgctacctgcaagaaatcttcagtaacgagatggcaaaggttgacgatagctttttccatcgcctggaagaatcctttcttgttgaggaagacaagaagcacgaacggcaccccatctttggcaatattgtcgacgaagtggcatatcacgaaaagtacccgactatctaccacctcaggaagaagctggtggactctaccgataaggcggacctcagacttatttatttggcactcgcccacatgattaaatttagaggacatttcttgatcgagggcgacctgaacccggacaacagtgacgtcgataagctgttcatccaacttgtgcagacctacaatcaactgttcgaagaaaaccctataaatgcttcaggagtcgacgctaaagcaatcctgtccgcgcgcctctcaaaatctagaagacttgagaatctgattgctcagttgcccggggaaaagaaaaatggattgtttggcaacctgatcgccctcagtctcggactgaccccaaatttcaaaagtaacttcgacctggccgaagacgctaagctccagctgtccaaggacacatacgatgacgacctcgacaatctgctggcccagattggggatcagtacgccgatctctttttggcagcaaagaacctgtccgacgccatcctgttgagcgatatcttgagagtgaacaccgaaattactaaagcaccccttagcgcatctatgatcaagcggtacgacgagcatcatcaggatctgaccctgctgaaggctcttgtgaggcaacagctccccgaaaaatacaaggaaatcttctttgaccagagcaaaaacggctacgctggctatatagatggtggggccagtcaggaggaattctataaattcatcaagcccattctcgagaaaatggacggcacagaggagttgctggtcaaacttaacagggaggacctgctgcggaagcagcggacctttgacaacgggtctatcccccaccagattcatctgggcgaactgcacgcaatcctgaggaggcaggaggatttttatccttttcttaaagataaccgcgagaaaatagaaaagattcttacattcaggatcccgtactacgtgggacctctcgcccggggcaattcacggtttgcctggatgacaaggaagtcagaggagactattacaccttggaacttcgaagaagtggtggacaagggtgcatctgcccagtctttcatcgagcggatgacaaattttgacaagaacctccctaatgagaaggtgctgcccaaacattctctgctctacgagtactttaccgtctacaatgaactgactaaagtcaagtacgtcaccgagggaatgaggaagccggcattccttagtggagaacagaagaaggcgattgtagacctgttgttcaagaccaacaggaaggtgactgtgaagcaacttaaagaagactactttaagaagatcgaatgttttgacagtgtggaaatttcaggggttgaagaccgcttcaatgcgtcattggggacttaccatgatcttctcaagatcataaaggacaaagacttcctggacaacgaagaaaatgaggatattctcgaagacatcgtcctcaccctgaccctgttcgaagacagggaaatgatagaagagcgcttgaaaacctatgcccacctcttcgacgataaagttatgaagcagctgaagcgcaggagatacacaggatggggaagattgtcaaggaagctgatcaatggaattagggataaacagagtggcaagaccatactggatttcctcaaatctgatggcttcgccaataggaacttcatgcaactgattcacgatgactctcttaccttcaaggaggacattcaaaaggctcaggtgagcgggcagggagactcccttcatgaacacatcgcgaatttggcaggttcccccgctattaaaaagggcatccttcaaactgtcaaggtggtggatgaattggtcaaggtaatgggcagacataagccagaaaatattgtgatcgagatggcccgcgaaaaccagaccacacagaagggccagaaaaatagtagagagcggatgaagaggatcgaggagggcatcaaagagctgggatctcagattctcaaagaacaccccgtagaaaacacacagctgcagaacgaaaaattgtacttgtactatctgcagaacggcagagacatgtacgtcgaccaagaacttgatattaatagactgtccgactatgacgtagaccatatcgtgccccagtccttcctgaaggacgactccattgataacaaagtcttgacaagaagcgacaagaacaggggtaaaagtgataatgtgcctagcgaggaggtggtgaaaaaaatgaagaactactggcgacagctgcttaatgcaaagctcattacacaacggaagttcgataatctgacgaaagcagagagaggtggcttgtctgagttggacaaggcagggtttattaagcggcagctggtggaaactaggcagatcacaaagcacgtggcgcagattttggacagccggatgaacacaaaatacgacgaaaatgataaactgatacgagaggtcaaagttatcacgctgaaaagcaagctggtgtccgattttcggaaagacttccagttctacaaagttcgcgagattaataactaccatcatgctcacgatgcgtacctgaacgctgttgtcgggaccgccttgataaagaagtacccaaagctggaatccgagttcgtatacggggattacaaagtgtacgatgtgaggaaaatgatagccaagtccgagcaggagattggaaaggccacagctaagtacttcttttattctaacatcatgaatttttttaagacggaaattaccctggccaacggagagatcagaaagcggccccttatagagacaaatggtgaaacaggtgaaatcgtctgggataagggcagggatttcgctactgtgaggaaggtgctgagtatgccacaggtaaatatcgtgaaaaaaaccgaagtacagaccggaggattttccaaggaaagcattttgcctaaaagaaactcagacaagctcatcgcccgcaagaaagattgggaccctaagaaatacgggggatttgactcacccaccgtagcctattctgtgctggtggtagctaaggtggaaaaaggaaagtctaagaagctgaagtccgtgaaggaactcttgggaatcactatcatggaaagatcatcctttgaaaagaaccctatcgatttcctggaggctaagggttacaaggaggtcaagaaagacctcatcattaaactgccaaaatactctctcttcgagctggaaaatggcaggaagagaatgttggccagcgccggagagctgcaaaagggaaacgagcttgctctgccctccaaatatgttaattttctctatctcgcttcccactatgaaaagctgaaagggtctcccgaagataacgagcagaagcagctgttcgtcgaacagcacaagcactatctggatgaaataatcgaacaaataagcgagttcagcaaaagggttatcctggcggatgctaatttggacaaagtactgtctgcttataacaagcaccgggataagcctattagggaacaagccgagaatataattcacctctttacactcacgaatctcggagcccccgccgccttcaaatactttgatacgactatcgaccggaaacggtataccagtaccaaagaggtcctcgatgccaccctcatccaccagtcaattactggcctgtacgaaacacggatcgacctctctcaactgggcggcgactag

SEQ ID NO: 4 - protein, 1388 aa, Streptococcus thermophilus
  misc_feature (10)..(21): N-terminal RuvC-like domain
  misc_feature (760)..(767): RuvC-like domain
  misc_feature (844)..(870): HNH-like domain
  misc_feature (989)..(996): RuvC-like domain
MTKPYSIGLDIGTNSVGWAVTTDNYKVPSKKMKVLGNTSKKYIKKNLLGVLLFDSGITAEGRRLKRTARRRYTRRRNRILYLQEIFSTEMATLDDAFFQRLDDSFLVPDDKRDSKYPIFGNLVEEKAYHDEFPTIYHLRKYLADSTKKADLRLVYLALAHMIKYRGHFLIEGEFNSKNNDIQKNFQDFLDTYNAIFESDLSLENSKQLEEIVKDKISKLEKKDRILKLFPGEKNSGIFSEFLKLIVGNQADFRKCFNLDEKASLHFSKESYDEDLETLLGYIGDDYSDVFLKAKKLYDAILLSGFLTVTDNETEAPLSSAMIKRYNEHKEDLALLKEYIRNISLKTYNEVFKDDTKNGYAGYIDGKTNQEDFYVYLKKLLAEFEGADYFLEKIDREDFLRKQRTFDNGSIPYQIHLQEMRAILDKQAKFYPFLAKNKERIEKILTFRIPYYVGPLARGNSDFAWSIRKRNEKITPWNFEDVIDKESSAEAFINRMTSFDLYLPEEKVLPKHSLLYETFNVYNELTKVRFIAESMRDYQFLDSKQKKDIVRLYFKDKRKVTDKDIIEYLHAIYGYDGIELKGIEKQFNSSLSTYHDLLNIINDKEFLDDSSNEAIIEEIIHTLTIFEDREMIKQRLSKFENIFDKSVLKKLSRRHYTGWGKLSAKLINGIRDEKSGNTILDYLIDDGISNRNFMQLIHDDALSFKKKIQKAQIIGDEDKGNIKEVVKSLPGSPAIKKGILQSIKIVDELVKVMGGRKPESIVVEMARENQYTNQGKSNSQQRLKRLEKSLKELGSKILKENIPAKLSKIDNNALQNDRLYLYYLQNGKDMYTGDDLDIDRLSNYDIDHIIPQAFLKDNSIDNKVLVSSASNRGKSDDVPSLEVVKKRKTFWYQLLKSKLISQRKFDNLTKAERGGLSPEDKAGFIQRQLVETRQITKHVARLLDEKFNNKKDENNRAVRTVKIITLKSTLVSQFRKDFELYKVREINDFHHAHDAYLNAVVASALLKKYPKLEPEFVYGDYPKYNSFRERKSATEKVYFYSNIMNIFKKSISLADGRVIERPLIEVNEETGESVWNKESDLATVRRVLSYPQVNVVKKVEEQNHGLDRGKPKGLFNANLSSKPKPNSNENLVGAKEYLDPKKYGGYAGISNSFTVLVKGTIEKGAKKKITNVLEFQGISILDRINYRKDKLNFLLEKGYKDIELIIELPKYSLFELSDGSRRMLASILSTNNKRGEIHKGNQIFLSQKFVKLLYHAKRISNTINENHRKYVENHKKEFEELFYYILEFNENYVGAKKNGKLLNSAFQSWQNHSIDELCSSFIGPTGSERKGLFELTSRGSAADFEFLGVKIPRYRDYTPSSLLKDATLIHQSVTGLYETRIDLAKLGEG

SEQ ID NO: 5 - protein, 1334 aa, Listeria innocua
  misc_feature (10)..(21): N-terminal RuvC-like domain
  misc_feature (762)..(769): RuvC-like domain
  misc_feature (840)..(866): HNH-like domain
  misc_feature (985)..(992): RuvC-like domain
MKKPYTIGLDIGTNSVGWAVLTDQYDLVKRKMKIAGDSEKKQIKKNFWGVRLFDEGQTAADRRMARTARRRIERRRNRISYLQGIFAEEMSKTDANFFCRLSDSFYVDNEKRNSRHPFFATIEEEVEYHKNYPTIYHLREELVNSSEKADLRLVYLALAHIIKYRGNFLIEGALDTQNTSVDGIYKQFIQTYNQVFASGIEDGSLKKLEDNKDVAKILVEKVTRKEKLERILKLYPGEKSAGMFAQFISLIVGSKGNFQKPFDLIEKSDIECAKDSYEEDLESLLALIGDEYAELFVAAKNAYSAVVLSSIITVAETETNAKLSASMIERFDTHEEDLGELKAFIKLHLPKHYEEIFSNTEKHGYAGYIDGKTKQADFYKYMKMTLENIEGADYFIAKIEKENFLRKQRTFDNGAIPHQLHLEELEAILHQQAKYYPFLKENYDKIKSLVTFRIPYFVGPLANGQSEFAWLTRKADGEIRPWNIEEKVDFGKSAVDFIEKMTNKDTYLPKENVLPKHSLCYQKYLVYNELTKVRYINDQGKTSYFSGQEKEQIFNDLFKQKRKVKKKDLELFLRNMSHVESPTIEGLEDSFNSSYSTYHDLLKVGIKQEILDNPVNTEMLENIVKILTVFEDKRMIKEQLQQFSDVLDGVVLKKLERRHYTGWGRLSAKLLMGIRDKQSHLTILDYLMNDDGLNRNLMQLINDSNLSFKSIIEKEQVTTADKDIQSIVADLAGSPAIKKGILQSLKIVDELVSVMGYPPQTIVVEMARENQTTGKGKNNSRPRYKSLEKAIKEFGSQILKEHPTDNQELRNNRLYLYYLQNGKDMYTGQDLDIHNLSNYDIDHIVPQSFITDNSIDNLVLTSSAGNREKGDDVPPLEIVRKRKVFWEKLYQGNLMSKRKFDYLTKAERGGLTEADKARFIHRQLVETRQITKNVANILHQRFNYEKDDHGNTMKQVRIVTLKSALVSQFRKQFQLYKVRDVNDYHHAHDAYLNGVVANTLLKVYPQLEPEFVYGDYHQFDWFKANKATAKKQFYTNIMLFFAQKDRIIDENGEILWDKKYLDTVKKVMSYRQMNIVKKTEIQKGEFSKATIKPKGNSSKLIPRKTNWDPMKYGGLDSPNMAYAVVIEYAKGKNKLVFEKKIIRVTIMERKAFEKDEKAFLEEQGYRQPKVLAKLPKYTLYECEEGRRRMLASANEAQKGNQQVLPNHLVTLLHHAANCEVSDGKSLDYIESNREMFAELLAHVSEFAKRYTLAEANLNKINQLFEQNKEGDIKAIAQSFVDLMAFNAMGAPASFKFFETTIERKRYNNLKELLNSTIIYQSITGLYESRKRLDD

SEQ ID NO: 6 - protein, 1053 aa, Staphylococcus aureus
MKRNYILGLDIGITSVGYGIIDYETRDVIDAGVRLFKEANVENNEGRRSKRGARRLKRRRRHRIQRVKKLLFDYNLLTDHSELSGINPYEARVKGLSQKLSEEEFSAALLHLAKRRGVHNVNEVEEDTGNELSTKEQISRNSKALEEKYVAELQLERLKKDGEVRGSINRFKTSDYVKEAKQLLKVQKAYHQLDQSFIDTYIDLLETRRTYYEGPGEGSPFGWKDIKEWYEMLMGHCTYFPEELRSVKYAYNADLYNALNDLNNLVITRDENEKLEYYEKFQIIENVFKQKKKPTLKQIAKEILVNEEDIKGYRVTSTGKPEFTNLKVYHDIKDITARKEIIENAELLDQIAKILTIYQSSEDIQEELTNLNSELTQEEIEQISNLKGYTGTHNLSLKAINLILDELWHTNDNQIAIFNRLKLVPKKVDLSQQKEIPTTLVDDFILSPVVKRSFIQSIKVINAIIKKYGLPNDIIIELAREKNSKDAQKMINEMQKRNRQTNERIEEIIRTTGKENAKYLIEKIKLHDMQEGKCLYSLEAIPLEDLLNNPFNYEVDHIIPRSVSFDNSFNNKVLVKQEENSKKGNRTPFQYLSSSDSKISYETFKKHILNLAKGKGRISKTKKEYLLEERDINRFSVQKDFINRNLVDTRYATRGLMNLLRSYFRVNNLDVKVKSINGGFTSFLRRKWKFKKERNKGYKHHAEDALIIANADFIFKEWKKLDKAKKVMENQMFEEKQAESMPEIETEQEYKEIFITPHQIKHIKDFKDYKYSHRVDKKPNRELINDTLYSTRKDDKGNTLIVNNLNGLYDKDNDKLKKLINKSPEKLLMYHHDPQTYQKLKLIMEQYGDEKNPLYKYYEETGNYLTKYSKKDNGPVIKKIKYYGNKLNAHLDITDDYPNSRNKVVKLSLKPYRFDVYLDNGVYKFVTVKNLDVIKKENYYEVNSKCYEEAKKLKKISNQAEFIASFYNNDLIKINGELYRVIGVNNDLLNRIEVNMIDITYREYLENMNDKRPPRIIKTIASKTQSIKKYSTDILGNLYEVKSKKHPQIIKKG

SEQ ID NO: 7 - DNA, 3159 bp, Staphylococcus aureus
atgaaaaggaactacattctggggctggacatcgggattacaagcgtggggtatgggattattgactatgaaacaagggacgtgatcgacgcaggcgtcagactgttcaaggaggccaacgtggaaaacaatgagggacggagaagcaagaggggagccaggcgcctgaaacgacggagaaggcacagaatccagagggtgaagaaactgctgttcgattacaacctgctgaccgaccattctgagctgagtggaattaatccttatgaagccagggtgaaaggcctgagtcagaagctgtcagaggaagagttttccgcagctctgctgcacctggctaagcgccgaggagtgcataacgtcaatgaggtggaagaggacaccggcaacgagctgtctacaaaggaacagatctcacgcaatagcaaagctctggaagagaagtatgtcgcagagctgcagctggaacggctgaagaaagatggcgaggtgagagggtcaattaataggttcaagacaagcgactacgtcaaagaagccaagcagctgctgaaagtgcagaaggcttaccaccagctggatcagagcttcatcgatacttatatcgacctgctggagactcggagaacctactatgagggaccaggagaagggagccccttcggatggaaagacatcaaggaatggtacgagatgctgatgggacattgcacctattttccagaagagctgagaagcgtcaagtacgcttataacgcagatctgtacaacgccctgaatgacctgaacaacctggtcatcaccagggatgaaaacgagaaactggaatactatgagaagttccagatcatcgaaaacgtgtttaagcagaagaaaaagcctacactgaaacagattgctaaggagatcctggtcaacgaagaggacatcaagggctaccgggtgacaagcactggaaaaccagagttcaccaatctgaaagtgtatcacgatattaaggacatcacagcacggaaagaaatcattgagaacgccgaactgctggatcagattgctaagatcctgactatctaccagagctccgaggacatccaggaagagctgactaacctgaacagcgagctgacccaggaagagatcgaacagattagtaatctgaaggggtacaccggaacacacaacctgtccctgaaagctatcaatctgattctggatgagctgtggcatacaaacgacaatcagattgcaatctttaaccggctgaagctggtcccaaaaaaggtggacctgagtcagcagaaagagatcccaaccacactggtggacgatttcattctgtcacccgtggtcaagcggagcttcatccagagcatcaaagtgatcaacgccatcatcaagaagtacggcctgcccaatgatatcattatcgagctggctagggagaagaacagcaaggacgcacagaagatgatcaatgagatgcagaaacgaaaccggcagaccaatgaacgcattgaagagattatccgaactaccgggaaagagaacgcaaagtacctgattgaaaaaatcaagctgcacgatatgcaggagggaaagtgtctgtattctctggaggccatccccctggaggacctgctgaacaatccattcaactacgaggtcgatcatattatccccagaagcgtgtccttcgacaattcctttaacaacaaggtgctggtcaagcaggaagagaactctaaaaagggcaataggactcctttccagtacctgtctagttcagattccaagatctcttacgaaacctttaaaaagcacattctgaatctggccaaaggaaagggccgcatcagcaagaccaaaaaggagtacctgctggaagagcgggacatcaacagattctccgtccagaaggattttattaaccggaatctggtggacacaagatacgctactcgcggcctgatgaatctgctgcgatcctatttccgggtgaacaatctggatgtgaaagtcaagtccatcaacggcgggttcacatcttttctgaggcgcaaatggaagtttaaaaaggagcgcaacaaagggtacaagcaccatgccgaagatgctctgattatcgcaaatgccgacttcatctttaaggagtggaaaaagctggacaaagccaagaaagtgatggagaaccagatgttcgaagagaagcaggccgaatctatgcccgaaatcgagacagaacaggagtacaaggagattttcatcactcctcaccagatcaagcatatcaaggatttcaaggactacaagtactctcaccgggtggataaaaagcccaacagagagctgatcaatgacaccctgtatagtacaagaaaagacgataaggggaataccctgattgtgaacaatctgaacggactgtacgacaaagataatgacaagctgaaaaagctgatcaacaaaagtcccgagaagctgctgatgtaccaccatgatcctcagacatatcagaaactgaagctgattatggagcagtacggcgacgagaagaacccactgtataagtactatgaagagactgggaactacctgaccaagtatagcaaaaaggataatggccccgtgatcaagaagatcaagtactatgggaacaagctgaatgcccatctggacatcacagacgattaccctaacagtcgcaacaaggtggtcaagctgtcactgaagccatacagattcgatgtctatctggacaacggcgtgtataaatttgtgactgtcaagaatctggatgtcatcaaaaaggagaactactatgaagtgaatagcaagtgctacgaagaggctaaaaagctgaaaaagattagcaaccaggcagagttcatcgcctccttttacaacaacgacctgattaagatcaatggcgaactgtatagggtcatcggggtgaacaatgatctgctgaaccgcattgaagtgaatatgattgacatcacttaccgagagtatctggaaaacatgaatgataagcgcccccctcgaattatcaaaacaattgcctctaagactcagagtatcaaaaagtactcaaccgacattctgggaaacctgtatgaggtgaagagcaaaaagcaccctcagattatcaaaaagggc

SEQ ID NO: 8 - DNA, 3159 bp, Staphylococcus aureus
atgaagcggaactacatcctgggcctggacatcggcatcaccagcgtgggctacggcatcatcgactacgagacacgggacgtgatcgatgccggcgtgcggctgttcaaagaggccaacgtggaaaacaacgagggcaggcggagcaagagaggcgccagaaggctgaagcggcggaggcggcatagaatccagagagtgaagaagctgctgttcgactacaacctgctgaccgaccacagcgagctgagcggcatcaacccctacgaggccagagtgaagggcctgagccagaagctgagcgaggaagagttctctgccgccctgctgcacctggccaagagaagaggcgtgcacaacgtgaacgaggtggaagaggacaccggcaacgagctgtccaccaaagagcagatcagccggaacagcaaggccctggaagagaaatacgtggccgaactgcagctggaacggctgaagaaagacggcgaagtgcggggcagcatcaacagattcaagaccagcgactacgtgaaagaagccaaacagctgctgaaggtgcagaaggcctaccaccagctggaccagagcttcatcgacacctacatcgacctgctggaaacccggcggacctactatgagggacctggcgagggcagccccttcggctggaaggacatcaaagaatggtacgagatgctgatgggccactgcacctacttccccgaggaactgcggagcgtgaagtacgcctacaacgccgacctgtacaacgccctgaacgacctgaacaatctcgtgatcaccagggacgagaacgagaagctggaatattacgagaagttccagatcatcgagaacgtgttcaagcagaagaagaagcccaccctgaagcagatcgccaaagaaatcctcgtgaacgaagaggatattaagggctacagagtgaccagcaccggcaagcccgagttcaccaacctgaaggtgtaccacgacatcaaggacattaccgcccggaaagagattattgagaacgccgagctgctggatcagattgccaagatcctgaccatctaccagagcagcgaggacatccaggaagaactgaccaatctgaactccgagctgacccaggaagagatcgagcagatctctaatctgaagggctataccggcacccacaacctgagcctgaaggccatcaacctgatcctggacgagctgtggcacaccaacgacaaccagatcgctatcttcaaccggctgaagctggtgcccaagaaggtggacctgtcccagcagaaagagatccccaccaccctggtggacgacttcatcctgagccccgtcgtgaagagaagcttcatccagagcatcaaagtgatcaacgccatcatcaagaagtacggcctgcccaacgacatcattatcgagctggcccgcgagaagaactccaaggacgcccagaaaatgatcaacgagatgcagaagcggaaccggcagaccaacgagcggatcgaggaaatcatccggaccaccggcaaagagaacgccaagtacctgatcgagaagatcaagctgcacgacatgcaggaaggcaagtgcctgtacagcctggaagccatccctctggaagatctgctgaacaaccccttcaactatgaggtggaccacatcatccccagaagcgtgtccttcgacaacagcttcaacaacaaggtgctcgtgaagcaggaagaaaacagcaagaagggcaaccggaccccattccagtacctgagcagcagcgacagcaagatcagctacgaaaccttcaagaagcacatcctgaatctggccaagggcaagggcagaatcagcaagaccaagaaagagtatctgctggaagaacgggacatcaacaggttctccgtgcagaaagacttcatcaaccggaacctggtggataccagatacgccaccagaggcctgatgaacctgctgcggagctacttcagagtgaacaacctggacgtgaaagtgaagtccatcaatggcggcttcaccagctttctgcggcggaagtggaagtttaagaaagagcggaacaaggggtacaagcaccacgccgaggacgccctgatcattgccaacgccgatttcatcttcaaagagtggaagaaactggacaaggccaaaaaagtgatggaaaaccagatgttcgaggaaaagcaggccgagagcatgcccgagatcgaaaccgagcaggagtacaaagagatcttcatcaccccccaccagatcaagcacattaaggacttcaaggactacaagtacagccaccgggtggacaagaagcctaatagagagctgattaacgacaccctgtactccacccggaaggacgacaagggcaacaccctgatcgtgaacaatctgaacggcctgtacgacaaggacaatgacaagctgaaaaagctgatcaacaagagccccgaaaagctgctgatgtaccaccacgacccccagacctaccagaaactgaagctgattatggaacagtacggcgacgagaagaatcccctgtacaagtactacgaggaaaccgggaactacctgaccaagtactccaaaaaggacaacggccccgtgatcaagaagattaagtattacggcaacaaactgaacgcccatctggacatcaccgacgactaccccaacagcagaaacaaggtcgtgaagctgtccctgaagccctacagattcgacgtgtacctggacaatggcgtgtacaagttcgtgaccgtgaagaatctggatgtgatcaaaaaagaaaactactacgaagtgaatagcaagtgctatgaggaagctaagaagctgaagaagatcagcaaccaggccgagtttatcgcctccttctacaacaacgatctgatcaagatcaacggcgagctgtatagagtgatcggcgtgaacaacgacctgctgaaccggatcgaagtgaacatgatcgacatcacctaccgcgagtacctggaaaacatgaacgacaagaggccccccaggatcattaagacaatcgcctccaagacccagagcattaagaagtacagcacagacattctgggcaacctgtatgaagtgaaatctaagaagcaccctcagatcatcaaaaagggc

SEQ ID NO: 9 - DNA, 3159 bp, Staphylococcus aureus
atgaagcgcaactacatcctcggactggacatcggcattacctccgtgggatacggcatcatcgattacgaaactagggatgtgatcgacgctggagtcaggctgttcaaagaggcgaacgtggagaacaacgaggggcggcgctcaaagaggggggcccgccggctgaagcgccgccgcagacatagaatccagcgcgtgaagaagctgctgttcgactacaaccttctgaccgaccactccgaactttccggcatcaacccatatgaggctagagtgaagggattgtcccaaaagctgtccgaggaagagttctccgccgcgttgctccacctcgccaagcgcaggggagtgcacaatgtgaacgaagtggaagaagataccggaaacgagctgtccaccaaggagcagatcagccggaactccaaggccctggaagagaaatacgtggcggaactgcaactggagcggctgaagaaagacggagaagtgcgcggctcgatcaaccgcttcaagacctcggactacgtgaaggaggccaagcagctcctgaaagtgcaaaaggcctatcaccaacttgaccagtcctttatcgatacctacatcgatctgctcgagactcggcggacttactacgagggtccaggggagggctccccatttggttggaaggatattaaggagtggtacgaaatgctgatgggacactgcacatacttccctgaggagctgcggagcgtgaaatacgcatacaacgcagacctgtacaacgcgctgaacgacctgaacaatctcgtgatcacccgggacgagaacgaaaagctcgagtattacgaaaagttccagattattgagaacgtgttcaaacagaagaagaagccgacactgaagcagattgccaaggaaatcctcgtgaacgaagaggacatcaagggctatcgagtgacctcaacgggaaagccggagttcaccaatctgaaggtctaccacgacatcaaagacattaccgcccggaaggagatcattgagaacgcggagctgttggaccagattgcgaagattctgaccatctaccaatcctccgaggatattcaggaagaactcaccaacctcaacagcgaactgacccaggaggagatagagcaaatctccaacctgaagggctacaccggaactcataacctgagcctgaaggccatcaacttgatcctggacgagctgtggcacaccaacgataaccagatcgctattttcaatcggctgaagctggtccccaagaaagtggacctctcacaacaaaaggagatccctactacccttgtggacgatttcattctgtcccccgtggtcaagagaagcttcatacagtcaatcaaagtgatcaatgccattatcaagaaatacggtctgcccaacgacattatcattgagctcgcccgcgagaagaactcgaaggacgcccagaagatgattaacgaaatgcagaagaggaaccgacagactaacgaacggatcgaagaaatcatccggaccaccgggaaggaaaacgcgaagtacctgatcgaaaagatcaagctccatgacatgcaggaaggaaagtgtctgtactcgctggaggccattccgctggaggacttgctgaacaacccttttaactacgaagtggatcatatcattccgaggagcgtgtcattcgacaattccttcaacaacaaggtcctcgtgaagcaggaggaaaactcgaagaagggaaaccgcacgccgttccagtacctgagcagcagcgactccaagatttcctacgaaaccttcaagaagcacatcctcaacctggcaaaggggaagggtcgcatctccaagaccaagaaggaatatctgctggaagaaagagacatcaacagattctccgtgcaaaaggacttcatcaaccgcaacctcgtggatactagatacgctactcggggtctgatgaacctcctgagaagctactttagagtgaacaatctggacgtgaaggtcaagtcgattaacggaggtttcacctccttcctgcggcgcaagtggaagttcaagaaggaacggaacaagggctacaagcaccacgccgaggacgccctgatcattgccaacgccgacttcatcttcaaagaatggaagaaacttgacaaggctaagaaggtcatggaaaaccagatgttcgaagaaaagcaggccgagtctatgcctgaaatcgagactgaacaggagtacaaggaaatctttattacgccacaccagatcaaacacatcaaggatttcaaggattacaagtactcacatcgcgtggacaaaaagccgaacagggaactgatcaacgacaccctctactccacccggaaggatgacaaagggaataccctcatcgtcaacaaccttaacggcctgtacgacaaggacaacgataagctgaagaagctcattaacaagtcgcccgaaaagttgctgatgtaccaccacgaccctcagacttaccagaagctcaagctgatcatggagcagtatggggacgagaaaaacccgttgtacaagtactacgaagaaactgggaattatctgactaagtactccaagaaagataacggccccgtgattaagaagattaagtactacggcaacaagctgaacgcccatctggacatcaccgatgactaccctaattcccgcaacaaggtcgtcaagctgagcctcaagccctaccggtttgatgtgtaccttgacaatggagtgtacaagttcgtgactgtgaagaaccttgacgtgatcaagaaggagaactactacgaagtcaactccaagtgctacgaggaagcaaagaagttgaagaagatctcgaaccaggccgagttcattgcctccttctataacaacgacctgattaagatcaacggcgaactgtaccgcgtcattggcgtgaacaacgatctcctgaaccgcatcgaagtgaacatgatcgacatcacttaccgggaatacctggagaatatgaacgacaagcgcccgccccggatcattaagactatcgcctcaaagacccagtcgatcaagaagtacagcaccgacatcctgggcaacctgtacgaggtcaaatcgaagaagcacccccagatcatcaagaaggga

SEQ ID NO: 10 - DNA, 3159 bp, Staphylococcus aureus
atgaaaaggaactacattctggggctggccatcgggattacaagcgtggggtatgggattattgactatgaaacaagggacgtgatcgacgcaggcgtcagactgttcaaggaggccaacgtggaaaacaatgagggacggagaagcaagaggggagccaggcgcctgaaacgacggagaaggcacagaatccagagggtgaagaaactgctgttcgattacaacctgctgaccgaccattctgagctgagtggaattaatccttatgaagccagggtgaaaggcctgagtcagaagctgtcagaggaagagttttccgcagctctgctgcacctggctaagcgccgaggagtgcataacgtcaatgaggtggaagaggacaccggcaacgagctgtctacaaaggaacagatctcacgcaatagcaaagctctggaagagaagtatgtcgcagagctgcagctggaacggctgaagaaagatggcgaggtgagagggtcaattaataggttcaagacaagcgactacgtcaaagaagccaagcagctgctgaaagtgcagaaggcttaccaccagctggatcagagcttcatcgatacttatatcgacctgctggagactcggagaacctactatgagggaccaggagaagggagccccttcggatggaaagacatcaaggaatggtacgagatgctgatgggacattgcacctattttccagaagagctgagaagcgtcaagtacgcttataacgcagatctgtacaacgccctgaatgacctgaacaacctggtcatcaccagggatgaaaacgagaaactggaatactatgagaagttccagatcatcgaaaacgtgtttaagcagaagaaaaagcctacactgaaacagattgctaaggagatcctggtcaacgaagaggacatcaagggctaccgggtgacaagcactggaaaaccagagttcaccaatctgaaagtgtatcacgatattaaggacatcacagcacggaaagaaatcattgagaacgccgaactgctggatcagattgctaagatcctgactatctaccagagctccgaggacatccaggaagagctgactaacctgaacagcgagctgacccaggaagagatcgaacagattagtaatctgaaggggtacaccggaacacacaacctgtccctgaaagctatcaatctgattctggatgagctgtggcatacaaacgacaatcagattgcaatctttaaccggctgaagctggtcccaaaaaaggtggacctgagtcagcagaaagagatcccaaccacactggtggacgatttcattctgtcacccgtggtcaagcggagcttcatccagagcatcaaagtgatcaacgccatcatcaagaagtacggcctgcccaatgatatcattatcgagctggctagggagaagaacagcaaggacgcacagaagatgatcaatgagatgcagaaacgaaaccggcagaccaatgaacgcattgaagagattatccgaactaccgggaaagagaacgcaaagtacctgattgaaaaaatcaagctgcacgatatgcaggagggaaagtgtctgtattctctggaggccatccccctggaggacctgctgaacaatccattcaactacgaggtcgatcatattatccccagaagcgtgtccttcgacaattcctttaacaacaaggtgctggtcaagcaggaagagaactctaaaaagggcaataggactcctttccagtacctgtctagttcagattccaagatctcttacgaaacctttaaaaagcacattctgaatctggccaaaggaaagggccgcatcagcaagaccaaaaaggagtacctgctggaagagcgggacatcaacagattctccgtccagaaggattttattaaccggaatctggtggacacaagatacgctactcgcggcctgatgaatctgctgcgatcctatttccgggtgaacaatctggatgtgaaagtcaagtccatcaacggcgggttcacatcttttctgaggcgcaaatggaagtttaaaaaggagcgcaacaaagggtacaagcaccatgccgaagatgctctgattatcgcaaatgccgacttcatctttaaggagtggaaaaagctggacaaagccaagaaagtgatggagaaccagatgttcgaagagaagcaggccgaatctatgcccgaaatcgagacagaacaggagtacaaggagattttcatcactcctcaccagatcaagcatatcaaggatttcaaggactacaagtactctcaccgggtggataaaaagcccaacagagagctgatcaatgacaccctgtatagtacaagaaaagacgataaggggaataccctgattgtgaacaatctgaacggactgtacgacaaagataatgacaagctgaaaaagctgatcaacaaaagtcccgagaagctgctgatgtaccaccatgatcctcagacatatcagaaactgaagctgattatggagcagtacggcgacgagaagaacccactgtataagtactatgaagagactgggaactacctgaccaagtatagcaaaaaggataatggccccgtgatcaagaagatcaagtactatgggaacaagctgaatgcccatctggacatcacagacgattaccctaacagtcgcaacaaggtggtcaagctgtcactgaagccatacagattcgatgtctatctggacaacggcgtgtataaatttgtgactgtcaagaatctggatgtcatcaaaaaggagaactactatgaagtgaatagcaagtgctacgaagaggctaaaaagctgaaaaagattagcaaccaggcagagttcatcgcctccttttacaacaacgacctgattaagatcaatggcgaactgtatagggtcatcggggtgaacaatgatctgctgaaccgcattgaagtgaatatgattgacatcacttaccgagagtatctggaaaacatgaatgataagcgcccccctcgaattatcaaaacaattgcctctaagactcagagtatcaaaaagtactcaaccgacattctgggaaacctgtatgaggtgaagagcaaaaagcaccctcagattatcaaaaagggc

SEQ ID NO: 11 - DNA, 3159 bp, Staphylococcus aureus
atgaaaaggaactacattctggggctggacatcgggattacaagcgtggggtatgggattattgactatgaaacaagggacgtgatcgacgcaggcgtcagactgttcaaggaggccaacgtggaaaacaatgagggacggagaagcaagaggggagccaggcgcctgaaacgacggagaaggcacagaatccagagggtgaagaaactgctgttcgattacaacctgctgaccgaccattctgagctgagtggaattaatccttatgaagccagggtgaaaggcctgagtcagaagctgtcagaggaagagttttccgcagctctgctgcacctggctaagcgccgaggagtgcataacgtcaatgaggtggaagaggacaccggcaacgagctgtctacaaaggaacagatctcacgcaatagcaaagctctggaagagaagtatgtcgcagagctgcagctggaacggctgaagaaagatggcgaggtgagagggtcaattaataggttcaagacaagcgactacgtcaaagaagccaagcagctgctgaaagtgcagaaggcttaccaccagctggatcagagcttcatcgatacttatatcgacctgctggagactcggagaacctactatgagggaccaggagaagggagccccttcggatggaaagacatcaaggaatggtacgagatgctgatgggacattgcacctattttccagaagagctgagaagcgtcaagtacgcttataacgcagatctgtacaacgccctgaatgacctgaacaacctggtcatcaccagggatgaaaacgagaaactggaatactatgagaagttccagatcatcgaaaacgtgtttaagcagaagaaaaagcctacactgaaacagattgctaaggagatcctggtcaacgaagaggacatcaagggctaccgggtgacaagcactggaaaaccagagttcaccaatctgaaagtgtatcacgatattaaggacatcacagcacggaaagaaatcattgagaacgccgaactgctggatcagattgctaagatcctgactatctaccagagctccgaggacatccaggaagagctgactaacctgaacagcgagctgacccaggaagagatcgaacagattagtaatctgaaggggtacaccggaacacacaacctgtccctgaaagctatcaatctgattctggatgagctgtggcatacaaacgacaatcagattgcaatctttaaccggctgaagctggtcccaaaaaaggtggacctgagtcagcagaaagagatcccaaccacactggtggacgatttcattctgtcacccgtggtcaagcggagcttcatccagagcatcaaagtgatcaacgccatcatcaagaagtacggcctgcccaatgatatcattatcgagctggctagggagaagaacagcaaggacgcacagaagatgatcaatgagatgcagaaacgaaaccggcagaccaatgaacgcattgaagagattatccgaactaccgggaaagagaacgcaaagtacctgattgaaaaaatcaagctgcacgatatgcaggagggaaagtgtctgtattctctggaggccatccccctggaggacctgctgaacaatccattcaactacgaggtcgatcatattatccccagaagcgtgtccttcgacaattcctttaacaacaaggtgctggtcaagcaggaagaggcctctaaaaagggcaataggactcctttccagtacctgtctagttcagattccaagatctcttacgaaacctttaaaaagcacattctgaatctggccaaaggaaagggccgcatcagcaagaccaaaaaggagtacctgctggaagagcgggacatcaacagattctccgtccagaaggattttattaaccggaatctggtggacacaagatacgctactcgcggcctgatgaatctgctgcgatcctatttccgggtgaacaatctggatgtgaaagtcaagtccatcaacggcgggttcacatcttttctgaggcgcaaatggaagtttaaaaaggagcgcaacaaagggtacaagcaccatgccgaagatgctctgattatcgcaaatgccgacttcatctttaaggagtggaaaaagctggacaaagccaagaaagtgatggagaaccagatgttcgaagagaagcaggccgaatctatgcccgaaatcgagacagaacaggagtacaaggagattttcatcactcctcaccagatcaagcatatcaaggatttcaaggactacaagtactctcaccgggtggataaaaagcccaacagagagctgatcaatgacaccctgtatagtacaagaaaagacgataaggggaataccctgattgtgaacaatctgaacggactgtacgacaaagataatgacaagctgaaaaagctgatcaacaaaagtcccgagaagctgctgatgtaccaccatgatcctcagacatatcagaaactgaagctgattatggagcagtacggcgacgagaagaacccactgtataagtactatgaagagactgggaactacctgaccaagtatagcaaaaaggataatggccccgtgatcaagaagatcaagtactatgggaacaagctgaatgcccatctggacatcacagacgattaccctaacagtcgcaacaaggtggtcaagctgtcactgaagccatacagattcgatgtctatctggacaacggcgtgtataaatttgtgactgtcaagaatctggatgtcatcaaaaaggagaactactatgaagtgaatagcaagtgctacgaagaggctaaaaagctgaaaaagattagcaaccaggcagagttcatcgcctccttttacaacaacgacctgattaagatcaatggcgaactgtatagggtcatcggggtgaacaatgatctgctgaaccgcattgaagtgaatatgattgacatcacttaccgagagtatctggaaaacatgaatgataagcgcccccctcgaattatcaaaacaattgcctctaagactcagagtatcaaaaagtactcaaccgacattctgggaaacctgtatgaggtgaagagcaaaaagcaccctcagattatcaaaaagggc

SEQ ID NO: 12 - protein, 1082 aa, Neisseria meningitidis
MAAFKPNPINYILGLDIGIASVGWAMVEIDEDENPICLIDLGVRVFERAEVPKTGDSLAMARRLARSVRRLTRRRAHRLLRARRLLKREGVLQAADFDENGLIKSLPNTPWQLRAAALDRKLTPLEWSAVLLHLIKHRGYLSQRKNEGETADKELGALLKGVADNAHALQTGDFRTPAELALNKFEKESGHIRNQRGDYSHTFSRKDLQAELILLFEKQKEFGNPHVSGGLKEGIETLLMTQRPALSGDAVQKMLGHCTFEPAEPKAAKNTYTAERFIWLTKLNNLRILEQGSERPLTDTERATLMDEPYRKSKLTYAQARKLLGLEDTAFFKGLRYGKDNAEASTLMEMKAYHAISRALEKEGLKDKKSPLNLSPELQDEIGTAFSLFKTDEDITGRLKDRIQPEILEALLKHISFDKFVQISLKALRRIVPLMEQGKRYDEACAEIYGDHYGKKNTEEKIYLPPIPADEIRNPVVLRALSQARKVINGVVRRYGSPARIHIETAREVGKSFKDRKEIEKRQEENRKDREKAAAKFREYFPNFVGEPKSKDILKLRLYEQQHGKCLYSGKEINLGRLNEKGYVEIDHALPFSRTWDDSFNNKVLVLGSENQNKGNQTPYEYFNGKDNSREWQEFKARVETSRFPRSKKQRILLQKFDEDGFKERNLNDTRYVNRFLCQFVADRMRLTGKGKKRVFASNGQITNLLRGFWGLRKVRAENDRHHALDAVVVACSTVAMQQKITRFVRYKEMNAFDGKTIDKETGEVLHQKTHFPQPWEFFAQEVMIRVFGKPDGKPEFEEADTPEKLRTLLAEKLSSRPEAVHEYVTPLFVSRAPNRKMSGQGHMETVKSAKRLDEGVSVLRVPLTQLKLKDLEKMVNREREPKLYEALKARLEAHKDDPAKAFAEPFYKYDKAGNRTQQVKAVRVEQVQKTGVWVRNHNGIADNATMVRVDVFEKGDKYYLVPIYSWQVAKGILPDRAVVQGKDEEDWQLIDDSFNFKFSLHPNDLVEVITKKARMFGYFASCHRGTGNINIRIHDLDHKIGKNGILEGIGVKTALSFQKYQIDELGKEIRPCRLKKRPPVR

SEQ ID NO: 13 - DNA, 3249 bp, Neisseria meningitidis
  misc_feature (1)..(3249): Exemplary codon optimized Cas9
atggccgccttcaagcccaaccccatcaactacatcctgggcctggacatcggcatcgccagcgtgggctgggccatggtggagatcgacgaggacgagaaccccatctgcctgatcgacctgggtgtgcgcgtgttcgagcgcgctgaggtgcccaagactggtgacagtctggctatggctcgccggcttgctcgctctgttcggcgccttactcgccggcgcgctcaccgccttctgcgcgctcgccgcctgctgaagcgcgagggtgtgctgcaggctgccgacttcgacgagaacggcctgatcaagagcctgcccaacactccttggcagctgcgcgctgccgctctggaccgcaagctgactcctctggagtggagcgccgtgctgctgcacctgatcaagcaccgcggctacctgagccagcgcaagaacgagggcgagaccgccgacaaggagctgggtgctctgctgaagggcgtggccgacaacgcccacgccctgcagactggtgacttccgcactcctgctgagctggccctgaacaagttcgagaaggagagcggccacatccgcaaccagcgcggcgactacagccacaccttcagccgcaaggacctgcaggccgagctgatcctgctgttcgagaagcagaaggagttcggcaacccccacgtgagcggcggcctgaaggagggcatcgagaccctgctgatgacccagcgccccgccctgagcggcgacgccgtgcagaagatgctgggccactgcaccttcgagccagccgagcccaaggccgccaagaacacctacaccgccgagcgcttcatctggctgaccaagctgaacaacctgcgcatcctggagcagggcagcgagcgccccctgaccgacaccgagcgcgccaccctgatggacgagccctaccgcaagagcaagctgacctacgcccaggcccgcaagctgctgggtctggaggacaccgccttcttcaagggcctgcgctacggcaaggacaacgccgaggccagcaccctgatggagatgaaggcctaccacgccatcagccgcgccctggagaaggagggcctgaaggacaagaagagtcctctgaacctgagccccgagctgcaggacgagatcggcaccgccttcagcctgttcaagaccgacgaggacatcaccggccgcctgaaggaccgcatccagcccgagatcctggaggccctgctgaagcacatcagcttcgacaagttcgtgcagatcagcctgaaggccctgcgccgcatcgtgcccctgatggagcagggcaagcgctacgacgaggcctgcgccgagatctacggcgaccactacggcaagaagaacaccgaggagaagatctacctgcctcctatccccgccgacgagatccgcaaccccgtggtgctgcgcgccctgagccaggcccgcaaggtgatcaacggcgtggtgcgccgctacggcagccccgcccgcatccacatcgagaccgcccgcgaggtgggcaagagcttcaaggaccgcaaggagatcgagaagcgccaggaggagaaccgcaaggaccgcgagaaggccgccgccaagttccgcgagtacttccccaacttcgtgggcgagcccaagagcaaggacatcctgaagctgcgcctgtacgagcagcagcacggcaagtgcctgtacagcggcaaggagatcaacctgggccgcctgaacgagaagggctacgtggagatcgaccacgccctgcccttcagccgcacctgggacgacagcttcaacaacaaggtgctggtgctgggcagcgagaaccagaacaagggcaaccagaccccctacgagtacttcaacggcaaggacaacagccgcgagtggcaggagttcaaggcccgcgtggagaccagccgcttcccccgcagcaagaagcagcgcatcctgctgcagaagttcgacgaggacggcttcaaggagcgcaacctgaacgacacccgctacgtgaaccgcttcctgtgccagttcgtggccgaccgcatgcgcctgaccggcaagggcaagaagcgcgtgttcgccagcaacggccagatcaccaacctgctgcgcggcttctggggcctgcgcaaggtgcgcgccgagaacgaccgccaccacgccctggacgccgtggtggtggcctgcagcaccgtggccatgcagcagaagatcacccgcttcgtgcgctacaaggagatgaacgccttcgacggtaaaaccatcgacaaggagaccggcgaggtgctgcaccagaagacccacttcccccagccctgggagttcttcgcccaggaggtgatgatccgcgtgttcggcaagcccgacggcaagcccgagttcgaggaggccgacacccccgagaagctgcgcaccctgctggccgagaagctgagcagccgccctgaggccgtgcacgagtacgtgactcctctgttcgtgagccgcgcccccaaccgcaagatgagcggtcagggtcacatggagaccgtgaagagcgccaagcgcctggacgagggcgtgagcgtgctgcgcgtgcccctgacccagctgaagctgaaggacctggagaagatggtgaaccgcgagcgcgagcccaagctgtacgaggccctgaaggcccgcctggaggcccacaaggacgaccccgccaaggccttcgccgagcccttctacaagtacgacaaggccggcaaccgcacccagcaggtgaaggccgtgcgcgtggagcaggtgcagaagaccggcgtgtgggtgcgcaaccacaacggcatcgccgacaacgccaccatggtgcgcgtggacgtgttcgagaagggcgacaagtactacctggtgcccatctacagctggcaggtggccaagggcatcctgcccgaccgcgccgtggtgcagggcaaggacgaggaggactggcagctgatcgacgacagcttcaacttcaagttcagcctgcaccccaacgacctggtggaggtgatcaccaagaaggcccgcatgttcggctacttcgccagctgccaccgcggcaccggcaacatcaacatccgcatccacgacctggaccacaagatcggcaagaacggcatcctggagggcatcggcgtgaagaccgccctgagcttccagaagtaccagatcgacgagctgggcaaggagatccgcccctgccgcctgaagaagcgccctcctgtgcgctaa

SEQ ID NO: 14 - protein, 859 aa, Artificial Sequence
  Synthetic Cas9 consensus sequence derived from Sm, Sp, St, and Li Cas9 sequences
  misc_feature (4)..(4): Xaa can be any naturally occurring amino acid
  misc_feature (8)..(18): N-terminal RuvC-like domain
  misc_feature (21)..(21): Xaa can be any naturally occurring amino acid
  misc_feature (23)..(23): Xaa can be any naturally occurring amino acid
  misc_feature (24)..(24): Xaa can be any naturally occurring amino acid
  misc_feature (26)..(26): Xaa can be any naturally occurring amino acid
  misc_feature (29)..(31): Each Xaa can independently be any naturally occurring amino acid
  misc_feature (33)..(33): Xaa can be any naturally occurring amino acid
  misc_feature (36)..(36): Xaa can be any naturally occurring amino acid
  misc_feature (45)..(45): Xaa can be any naturally occurring amino acid
  misc_feature (54)..(54): Xaa can be any naturally occurring amino acid
  misc_feature (63)..(63): Xaa can be any naturally occurring amino acid
  misc_feature (71)..(71): Xaa can be any naturally occurring amino acid
  misc_feature (75)..(75): Xaa can be any naturally occurring amino acid
  misc_feature (76)..(76): Xaa can be any naturally occurring amino acid
  misc_feature (78)..(80): Each Xaa can independently be any naturally occurring amino acid
  misc_feature (82)..(82): Xaa can be any naturally occurring amino acid
  misc_feature (84)..(84): Xaa can be any naturally occurring amino acid
  misc_feature (85)..(85): Xaa can be any naturally occurring amino acid
  misc_feature (89)..(89): Xaa can be any naturally occurring amino acid
  misc_feature (90)..(90): Xaa can be any naturally occurring amino acid
  misc_feature (98)..(98): Xaa can be any naturally occurring amino acid
  misc_feature (100)..(100): Xaa can be any naturally occurring amino acid
  misc_feature (106)..(106): Xaa can be any naturally occurring amino acid
  misc_feature (113)..(113): Xaa can be any naturally occurring amino acid
  misc_feature (116)..(116): Xaa can be any naturally occurring amino acid
  misc_feature (125)..(125): Xaa can be any naturally occurring amino acid
  misc_feature (126)..(126): Xaa can be any naturally occurring amino acid
  misc_feature (128)..(133): Each Xaa can independently be any naturally occurring amino acid
  misc_feature (135)..(135): Xaa can be any naturally occurring amino acid
  misc_feature (137)..(137): Xaa can be any naturally occurring amino acid
  misc_feature (139)..(147): Each Xaa can independently be any naturally occurring amino acid
  misc_feature (153)..(155): Each Xaa can independently be any naturally occurring amino acid
  misc_feature (157)..(157): Xaa can be any naturally occurring amino acid
  misc_feature (159)..(159): Xaa can be any naturally occurring amino acid
  misc_feature (161)..(161): Xaa can be any naturally occurring amino acid
  misc_feature (163)..(163): Xaa can be any naturally occurring amino acid
  misc_feature (166)..(168): Each Xaa can independently be any naturally occurring amino acid
  misc_feature (170)..(170): Xaa can be any naturally occurring amino acid
  misc_feature (171)..(171): Xaa can be any naturally occurring amino acid
  misc_feature (173)..(175): Each Xaa can independently be any naturally occurring amino acid
  misc_feature (177)..(177): Xaa can be any naturally occurring amino acid
  misc_feature (183)..(183): Xaa can be any naturally occurring amino acid
  misc_feature (185)..(187): Each Xaa can independently be any naturally occurring amino acid
  misc_feature (189)..(189): Xaa can be any naturally occurring amino acid
  misc_feature (192)..(195): Each Xaa can independently be any naturally occurring amino acid
  misc_feature (198)..(198): Xaa can be any naturally occurring amino acid
  misc_feature (199)..(199): Xaa can be any naturally occurring amino acid
  misc_feature (202)..(202): Xaa can be any naturally occurring amino acid
  misc_feature (206)..(206): Xaa can be any naturally occurring amino acid
  misc_feature (207)..(207): Xaa can be any naturally occurring amino acid
  misc_feature (210)..(210): Xaa can be any naturally occurring amino acid
  misc_feature (212)..(212): Xaa can be any naturally occurring amino acid
  misc_feature (213)..(213): Xaa can be any naturally occurring amino acid
  misc_feature (219)..(219): Xaa can be any naturally occurring amino acid
  misc_feature (220)..(220): Xaa can be any naturally occurring amino acid
  misc_feature (222)..(222): Xaa can be any naturally occurring amino acid
  misc_feature (224)..(224): Xaa can be any naturally occurring amino acid
  misc_feature (226)..(226): Xaa can be any naturally occurring amino acid
  misc_feature (236)..(236): Xaa can be any naturally occurring amino acid
  misc_feature (240)..(240): Xaa can be any naturally occurring amino acid
  misc_feature (241)..(241): Xaa can be any naturally occurring amino acid
  misc_feature (244)..(246): Each Xaa can independently be any naturally occurring amino acid
  misc_feature (248)..(248): Xaa can be any naturally occurring amino acid
  misc_feature (249)..(249): Xaa can be any naturally occurring amino acid
  misc_feature (250)..(250): Xaa can be any naturally occurring amino acid
  misc_feature (252)..(254): Each Xaa can independently be any naturally occurring amino acid
  misc_feature (256)..(256): Xaa can be any naturally occurring amino acid
  misc_feature (257)..(257): Xaa can be any naturally occurring amino acid
  misc_feature (268)..(268): Xaa can be any naturally occurring amino acid
  misc_feature (271)..(271): Xaa can be any naturally occurring amino acid
  misc_feature (273)..(273): Xaa can be any naturally occurring amino acid
  misc_feature (277)..(277): Xaa can be any naturally occurring amino acid
  misc_feature (280)..(280): Xaa can be any naturally occurring amino acid
  misc_feature (281)..(281): Xaa can be any naturally occurring amino acid
  misc_feature (283)..(283): Xaa can be any naturally occurring amino acid
  misc_feature (289)..(289): Xaa can be any naturally occurring amino acid
  misc_feature (290)..(290): Xaa can be any naturally occurring amino acid
  misc_feature (292)..(294): Each Xaa can independently be any naturally occurring amino acid
  misc_feature (301)..(301): Xaa can be any naturally occurring amino acid
  misc_feature (308)..(308): Xaa can be any naturally occurring amino acid
  misc_feature (319)..(322): Each Xaa can independently be any naturally occurring amino acid
  misc_feature (328)..(328): Xaa can be any naturally occurring amino acid
  misc_feature (329)..(329): Xaa can be any naturally occurring amino acid
  misc_feature (335)..(337): Each Xaa can independently be any naturally occurring amino acid
  misc_feature (346)..(346): Xaa can be any naturally occurring amino acid
  misc_feature (347)..(347): Xaa can be any naturally occurring amino acid
  misc_feature (356)..(361): Each Xaa can independently be any naturally occurring amino acid
  misc_feature (363)..(363): Xaa can be any naturally occurring amino acid
  misc_feature (370)..(373): Each Xaa can independently be any naturally occurring amino acid
  misc_feature (375)..(375): Xaa can be any naturally occurring amino acid
  misc_feature (376)..(376): Xaa can be any naturally occurring amino acid
  misc_feature (379)..(379): Xaa can be any naturally occurring amino acid
  misc_feature (386)..(390): Each Xaa can independently be any naturally occurring amino acid
  misc_feature (393)..(393): Xaa can be any naturally occurring amino acid
  misc_feature (395)..(395): Xaa can be any naturally occurring amino acid
  misc_feature (396)..(396): Xaa can be any naturally occurring amino acid
  misc_feature (398)..(398): Xaa can be any naturally occurring amino acid
  misc_feature (400)..(400): Xaa can be any naturally occurring amino acid
  misc_feature (403)..(403): Xaa can be any naturally occurring amino acid
  misc_feature (407)..(407): Xaa can be any naturally occurring amino acid
  misc_feature (410)..(410): Xaa can be any naturally occurring amino acid
  misc_feature (411)..(411): Xaa can be any naturally occurring amino acid
  misc_feature (413)..(416): Each Xaa can independently be any naturally occurring amino acid
  misc_feature (418)..(418): Xaa can be any naturally occurring amino acid
  misc_feature (422)..(422): Xaa can be any naturally occurring amino acid
  misc_feature (428)..(428): Xaa can be any naturally occurring amino acid
  misc_feature (431)..(431): Xaa can be any naturally occurring amino acid
  misc_feature (433)..(433): Xaa can be any naturally occurring amino acid
  misc_feature (437)..(439): Each Xaa can independently be any naturally occurring amino acid
  misc_feature (445)..(445): Xaa can be any naturally occurring amino acid
  misc_feature (451)..(451): Xaa can be any naturally occurring amino acid
  misc_feature (456)..(456): Xaa can be any naturally occurring amino acid
  misc_feature (459)..(459): Xaa can be any naturally occurring amino acid
  misc_feature (465)..(469): Each Xaa can independently be any naturally occurring amino acid
  misc_feature (481)..(481): Xaa can be any naturally occurring amino acid
  misc_feature (482)..(482): Xaa can be any naturally occurring amino acid
  misc_feature (484)..(484): Xaa can be any naturally occurring amino acid
  misc_feature (490)..(490): Xaa can be any naturally occurring amino acid
  misc_feature (494)..(494): Xaa can be any naturally occurring amino acid
  misc_feature (495)..(502): RuvC-like domain
  misc_feature (497)..(497): Xaa can be any naturally occurring amino acid
  misc_feature (506)..(506): Xaa can be any naturally occurring amino acid
  misc_feature (510)..(510): Xaa can be any naturally occurring amino acid
  misc_feature (513)..(513): Xaa can be any naturally occurring amino acid
  misc_feature (514)..(514): Xaa can be any naturally occurring amino acid
  misc_feature (517)..(517): Xaa can be any naturally occurring amino acid
  misc_feature (520)..(520): Xaa can be any naturally occurring amino acid
  misc_feature (525)..(525): Xaa can be any naturally occurring amino acid
  misc_feature (526)..(526): Xaa can be any naturally occurring amino acid
  misc_feature (529)..(529): Xaa can be any naturally occurring amino acid
  misc_feature (531)..(531): Xaa can be any naturally occurring amino acid
  misc_feature (532)..(532): Xaa can be any naturally occurring amino acid
  misc_feature (534)..(534): Xaa can be any naturally occurring amino acid
  misc_feature (542)..(542): Xaa can be any naturally occurring amino acid
  misc_feature (546)..(546): Xaa can be any naturally occurring amino acid
  misc_feature (547)..(547): Xaa can be any naturally occurring amino acid
  misc_feature (553)..(553): Xaa can be any naturally occurring amino acid
  misc_feature (555)..(575): HNH-like domain
  misc_feature (556)..(556): Xaa can be any naturally occurring amino acid
  misc_feature (560)..(560): Xaa can be any naturally occurring amino acid
  misc_feature (563)..(563): Xaa can be any naturally occurring amino acid
  misc_feature (565)..(565): Xaa can be any naturally occurring amino acid
  misc_feature (567)..(567): Xaa can be any naturally occurring amino acid
  misc_feature (579)..(579): Xaa can be any naturally occurring amino acid
  misc_feature (582)..(582): Xaa can be any naturally occurring amino acid
  misc_feature (583)..(583): Xaa can be any naturally occurring amino acid
  misc_feature (585)..(585): Xaa can be any naturally occurring amino acid
  misc_feature (588)..(588): Xaa can be any naturally occurring amino acid
  misc_feature (590)..(590): Xaa can be any naturally occurring amino acid
  misc_feature (592)..(592): Xaa can be any naturally occurring amino acid
  misc_feature (594)..(596): Each Xaa can independently be any naturally occurring amino acid
  misc_feature (610)..(610): Xaa can be any naturally occurring amino acid
  misc_feature (616)..(616): Xaa can be any naturally occurring amino acid
  misc_feature (628)..(628): Xaa can be any naturally occurring amino acid
  misc_feature (631)..(631): Xaa can be any naturally occurring amino acid
  misc_feature (633)..(633): Xaa can be any naturally occurring amino acid
  misc_feature (634)..(634): Xaa can be any naturally occurring amino acid
  misc_feature (636)..(636): Xaa can be any naturally occurring amino acid
  misc_feature (638)..(641): Each Xaa can independently be any naturally occurring amino acid
  misc_feature (643)..(645): Each Xaa can independently be any naturally occurring amino acid
  misc_feature (653)..(653): Xaa can be any naturally occurring amino acid
  misc_feature (657)..(657): Xaa can be any naturally occurring amino acid
  misc_feature (659)..(659): Xaa can be any naturally occurring amino acid
  misc_feature (660)..(660): Xaa can be any naturally occurring amino acid
  misc_feature (665)..(665): Xaa can be any naturally occurring amino acid
  misc_feature (666)..(666): Xaa can be any naturally occurring amino acid
  misc_feature (668)..(668): Xaa can be any naturally occurring amino acid
  misc_feature (669)..(669): Xaa can be any naturally occurring amino acid
  misc_feature (670)..(677): RuvC-like domain
  misc_feature (680)..(680): Xaa can be any naturally occurring amino acid
  misc_feature (681)..(681): Xaa can be any naturally occurring amino acid
  misc_feature (683)..(683): Xaa can be any naturally occurring amino acid
  misc_feature (686)..(686): Xaa can be any naturally occurring amino acid
  misc_feature (696)..(696): Xaa can be any naturally occurring amino acid
  misc_feature (697)..(697): Xaa can be any naturally occurring amino acid
  misc_feature (704)..(704): Xaa can be any naturally occurring amino acid
  misc_feature (708)..(708): Xaa can be any naturally occurring amino acid
  misc_feature (710)..(710): Xaa can be any naturally occurring amino acid
  misc_feature (711)..(711): Xaa can be any naturally occurring amino acid
  misc_feature (714)..(714): Xaa can be any naturally occurring amino acid
  misc_feature (717)..(720): Each Xaa can independently be any naturally occurring amino acid
  misc_feature (722)..(722): Xaa can be any naturally occurring amino acid
  misc_feature (725)..(725): Xaa can be any naturally occurring amino acid
  misc_feature (727)..(727): Xaa can be any naturally occurring amino acid
  misc_feature (733)..(735): Each Xaa can independently be any naturally occurring amino acid
  misc_feature (740)..(740): Xaa can be any naturally occurring amino acid
  misc_feature (742)..(742): Xaa can be any naturally occurring amino acid
  misc_feature (749)..(754): Each Xaa can independently be any naturally occurring amino acid
  misc_feature (758)..(761): Each Xaa can independently be any naturally occurring amino acid
  misc_feature (763)..(768): Each Xaa can independently be any naturally occurring amino acid
  misc_feature (771)..(771): Xaa can be any naturally occurring amino acid
  misc_feature (774)..(777): Each Xaa can independently be any naturally occurring amino acid
  misc_feature (782)..(782): Xaa can be any naturally occurring amino acid
  misc_feature (784)..(786): Each Xaa can independently be any naturally occurring amino acid
  misc_feature (788)..(788): Xaa can be any naturally occurring amino acid
  misc_feature (790)..(790): Xaa can be any naturally occurring amino acid
  misc_feature (795)..(795): Xaa can be any naturally occurring amino acid
  misc_feature (799)..(799): Xaa can be any naturally occurring amino acid
  misc_feature (801)..(801): Xaa can be any naturally occurring amino acid
  misc_feature (802)..(802): Xaa can be any naturally occurring amino acid
  misc_feature (804)..(804): Xaa can be any naturally occurring amino acid
  misc_feature (806)..(813): Each Xaa can independently be any naturally occurring amino acid
  misc_feature (815)..(818): Each Xaa can independently be any naturally occurring amino acid
  misc_feature (820)..(820): Xaa can be any naturally occurring amino acid
  misc_feature (823)..(827): Each Xaa can independently be any naturally occurring amino acid
  misc_feature (829)..(829): Xaa can be any naturally occurring amino acid
  misc_feature (830)..(830): Xaa can be any naturally occurring amino acid
  misc_feature (832)..(832): Xaa can be any naturally occurring amino acid
  misc_feature (835)..(837): Each Xaa can independently be any naturally occurring amino acid
  misc_feature (842)..(844): Each Xaa can independently be any naturally occurring amino acid
  misc_feature (846)..(846): Xaa can be any naturally occurring amino acid
  misc_feature (848)..(848): Xaa can be any naturally occurring amino acid
  misc_feature (851)..(851): Xaa can be any naturally occurring amino acid
  misc_feature (857)..(857): Xaa can be any naturally occurring amino acid
  misc_feature (857)..(857): Xaa can be any naturally occurring amino acid
MKYXIGLDIGTNSVGWAVTDXYXXKXKGXXXIXKNXGLFDGTARXRTARRRRRXNRIYLQIFXEMDFFRLXSFVXXKXXXPXFXXEYHXXPTIYHLRXLXKDLRLXYLALAHXIKXRGNFLIEGXXNXXXXXXYXFXIXXXXXXXXXPEKGFXXXLXGXFXFXLEXXXKXXYXXXLXLLIGDXYXXXFXAKXXXXLSXXVTXALSXXMIXRXXHDLLKXXYXEXFXKGYAGYIDGXQFYXXKLXXXGXXXKXXXEXXLRKQRTFDNGXIPXQXHLEXAIXXQXYPFLNXXIXXXTFRIPYXVGPLAGXSFAWRKIPWNXXXXDSAFIXXMTDLPXXXVLPKHSLYXXVYNELTKVXXXXXXKXIFKRKVXXXXGXXFNXSTYHDLXXXXXLDXNXXEXIXLTXFEDXMIXXLXXXXKXLRRXYTGWGXLSXLXGIRXXXSTILDXLDNRNXMQLIXDLXFKIKQXXXXXGSPAIKKGILQXXKXVDELVXMGPXIVXEMARENQTXGNSXRKXXKEXGSXILKEXXNLXNXXLXLYYLQNGXDMYXXLDILSXYDXDHIXPQXFXDXSIDNVLSNRKDXVPXXVXKKXWXLXLXXXRKFDLTKAERGGLXDKAFIXRQLVETRQITKXVAXLXXNXDXXXXVXXXTLKSLVSXFRKXFXXLYKVXXNXXHHAHDAYLNVXXLXYPXLEEFVYGDYXXKATKFYXNIMXFXXGEXWKXXXXVXMQXNXVKKEQXXXPKNSXLXKDKYGGXXXXXXKGKXXXXIXXXXXXFLXGYXXXXLPKYXLXXXGXRXLASEXKGNXLXXLXAXXXXXXXXEXXXXFXANXXXXXLXXGXAFXXXIRRYXXXTXIXQSXTGLYEXRL

SEQ ID NO: 15 - protein, 8 aa, Artificial Sequence
  RuvC-like domain
  VARIANT (2)..(2): Xaa is Val or His
  VARIANT (3)..(3): Xaa is Ile, Leu, or Val
  VARIANT (5)..(5): Xaa is Met or Thr
IXXEXARE

SEQ ID NO: 16 - protein, 8 aa, Artificial Sequence
  RuvC-like domain
  VARIANT (3)..(3): Xaa is Ile, Leu, or Val
IVXEMARE

SEQ ID NO: 17 - protein, 8 aa, Artificial Sequence
  RuvC-like domain
  VARIANT (4)..(4): Xaa is His or Leu
  VARIANT (7)..(7): Xaa is Arg or Val
  VARIANT (8)..(8): Xaa is Glu or Val
HHAXDAXX

SEQ ID NO: 18 - protein, 8 aa, Artificial Sequence
  RuvC-like domain
HHAHDAYL

SEQ ID NO: 19 - protein, 30 aa, Artificial Sequence
  N-terminal RuvC-like domain
  VARIANT (2)..(2): Xaa is Lys or Pro
  VARIANT (4)..(4): Xaa is Val, Leu, Ile, or Phe
  VARIANT (5)..(5): Xaa is Gly, Ala, or Ser
  VARIANT (6)..(6): Xaa is Leu, Ile, Val, or Phe
  MOD_RES (7)..(26): N-terminal RuvC-like domain, each Xaa can be any amino acid or absent, region may encompass 5-20 residues
  VARIANT (29)..(29): Xaa is Asp, Glu, Asn, or Gln
KXYXXXXXXXXXXXXXXXXXXXXXXXTDXY

SEQ ID NO: 20 - protein, 12 aa, Artificial Sequence
  N-terminal RuvC-like domain
  VARIANT (2)..(2): Xaa is Ile, Val, Met, Leu, or Thr
  VARIANT (4)..(4): Xaa is Thr, Ile, Val, Ser, Asn, Tyr, Glu, or Leu
  VARIANT (5)..(5): Xaa is Asn, Ser, Gly, Ala, Asp, Thr, Arg, Met, or Phe
  VARIANT (6)..(6): Xaa is Ser, Tyr, Asn, or Phe
  VARIANT (7)..(7): Xaa is Val, Ile, Leu, Cys, Thr, or Phe
  VARIANT (9)..(9): Xaa is Trp, Phe, Val, Tyr, Ser, or Leu
  VARIANT (10)..(10): Xaa is Ala, Ser, Cys, Val, or Gly
  VARIANT (11)..(11): Xaa is Val, Ile, Leu, Ala, Met, or His
  VARIANT (12)..(12): Any amino acid or absent
DXGXXXXGXXXX

SEQ ID NO: 21 - protein, 12 aa, Artificial Sequence
  N-terminal RuvC-like domain
  VARIANT (2)..(2): Xaa is Ile, Val, Met, Leu, or Thr
  VARIANT (4)..(4): Xaa is Thr, Ile, Val, Ser, Asn, Tyr, Glu, or Leu
  VARIANT (5)..(5): Xaa is Asn, Ser, Gly, Ala, Asp, Thr, Arg, Met, or Phe
  VARIANT (7)..(7): Xaa is Val, Ile, Leu, Cys, Thr, or Phe
  VARIANT (9)..(9): Xaa is Trp, Phe, Val, Tyr, Ser, or Leu
  VARIANT (10)..(10): Xaa is Ala, Ser, Cys, Val, or Gly
  VARIANT (11)..(11): Xaa is Val, Ile, Leu, Ala, Met, or His
  VARIANT (12)..(12): Any amino acid or absent
DXGXXSXGXXXX

SEQ ID NO: 22 - protein, 12 aa, Artificial Sequence
  N-terminal RuvC-like domain
  VARIANT (4)..(4): Xaa is Thr, Ile, Val, Ser, Asn, Tyr, Glu, or Leu
  VARIANT (5)..(5): Xaa is Asn, Ser, Gly, Ala, Asp, Thr, Arg, Met, or Phe
  VARIANT (11)..(11): Xaa is Val, Ile, Leu, Ala, Met, or His
  VARIANT (12)..(12): Any amino acid or absent
DIGXXSVGWAXX

SEQ ID NO: 23 - protein, 12 aa, Artificial Sequence
  N-terminal RuvC-like domain
  MOD_RES (12)..(12): Any non-polar alkyl amino acid or a hydroxyl amino acid
DIGTNSVGWAVX

SEQ ID NO: 24 - protein, 73 aa, Artificial Sequence
  HNH-like domain
  VARIANT (8)..(8): Xaa is Lys or Arg
  VARIANT (12)..(12): Xaa is Val or Thr
  VARIANT (13)..(13): Xaa is Gly or Asp
  VARIANT (14)..(14): Xaa is Glu, Gln, or Asp
  VARIANT (15)..(15): Xaa is Glu or Asp
  VARIANT (19)..(19): Xaa is Asp, Asn, or His
  VARIANT (20)..(20): Xaa is Tyr, Arg, or Asn
  VARIANT (23)..(23): Xaa is Gln, Asp, or Asn
  MOD_RES (25)..(64): HNH-like domain, each Xaa can be any amino acid or absent, region may encompass 15-40 residues
  VARIANT (67)..(67): Xaa is Gly or Glu
  VARIANT (69)..(69): Xaa is Ser or Gly
  VARIANT (71)..(71): Xaa is Asp or Asn
LYYLQNGXDMYXXXXLDIXXLSXYXXXXXXXXXXXXXXXXXXXXXXXXXXXXXXXXXXXXXXXXNRXKXDXVP

SEQ ID NO: 25 - protein, 27 aa, Artificial Sequence
  HNH-like domain
  VARIANT (1)..(1): Xaa is Asp, Glu, Gln, or Asn
  VARIANT (2)..(2): Xaa is Leu, Ile, Arg, Gln, Val, Met, or Lys
  VARIANT (3)..(3): Xaa is Asp or Glu
  VARIANT (5)..(5): Xaa is Ile, Val, Thr, Ala, or Leu
  VARIANT (6)..(6): Xaa is Val, Tyr, Ile, Leu, Phe, or Trp
  VARIANT (8)..(8): Xaa is Gln, His, Arg, Lys, Tyr, Ile, Leu, Phe, or Trp
  VARIANT (9)..(9): Xaa is Ser, Ala, Asp, Thr, or Lys
  VARIANT (10)..(10): Xaa is Phe, Leu, Val, Lys, Tyr, Met, Ile, Arg, Ala, Glu, Asp, or Gln
  VARIANT (11)..(11): Xaa is Leu, Arg, Thr, Ile, Val, Ser, Cys, Tyr, Lys, Phe, or Gly
  VARIANT (12)..(12): Xaa is Lys, Gln, Tyr, Thr, Phe, Leu, Trp, Met, Ala, Glu, Gly, or Ser
  VARIANT (13)..(13): Xaa is Asp, Ser, Asn, Arg, Leu, or Thr
  VARIANT (14)..(14): Xaa is Asp, Asn, or Ser
  VARIANT (15)..(15): Xaa is Ser, Ala, Thr, Gly, or Arg
  VARIANT (16)..(16): Xaa is Ile, Leu, Phe, Ser, Arg, Tyr, Gln, Trp, Asp, Lys, or His
  VARIANT (17)..(17): Xaa is Asp, Ser, Ile, Asn, Glu, Ala, His, Phe, Leu, Gln, Met, Gly, Tyr, or Val
  VARIANT (19)..(19): Xaa is Lys, Leu, Arg, Met, Thr, or Phe
  VARIANT (20)..(20): Xaa is Val, Leu, Ile, Ala, or Thr
  VARIANT (21)..(21): Xaa is Leu, Ile, Val, or Ala
  VARIANT (22)..(22): Xaa is Thr, Val, Cys, Glu, Ser, or Ala
  VARIANT (23)..(23): Xaa is Arg, Phe, Thr, Trp, Glu, Leu, Asn, Cys, Lys, Val, Ser, Gln, Ile, Tyr, His, or Ala
  VARIANT (24)..(24): Xaa is Ser, Pro, Arg, Lys, Asn, Ala, His, Gln, Gly, or Leu
  VARIANT (25)..(25): Xaa is Asp, Gly, Thr, Asn, Ser, Lys, Ala, Ile, Glu, Leu, Gln, Arg, or Tyr
  VARIANT (26)..(26): Xaa is Lys, Val, Ala, Glu, Tyr, Ile, Cys, Leu, Ser, Thr, Gly, Lys, Met, Asp, or Phe
XXXHXXPXXXXXXXXXXNXXXXXXXXN

SEQ ID NO: 26 - protein, 27 aa, Artificial Sequence
  HNH-like domain
  VARIANT (1)..(1): Xaa is Asp or Glu
  VARIANT (2)..(2): Xaa is Leu, Ile, Arg, Gln, Val, Met, or Lys
  VARIANT (3)..(3): Xaa is Asp or Glu
  VARIANT (5)..(5): Xaa is Ile, Val, Thr, Ala, or Leu
  VARIANT (6)..(6): Xaa is Val, Tyr, Ile, Leu, Phe, or Trp
  VARIANT (8)..(8): Xaa is Gln, His, Arg, Lys, Tyr, Ile, Leu, Phe, or Trp
  VARIANT (10)..(10): Xaa is Phe, Leu, Val, Lys, Tyr, Met, Ile, Arg, Ala, Glu, Asp, or Gln
  VARIANT (11)..(11): Xaa is Leu, Arg, Thr, Ile, Val, Ser, Cys, Tyr, Lys, Phe, or Gly
  VARIANT (12)..(12): Xaa is Lys, Gln, Tyr, Thr, Phe, Leu, Trp, Met, Ala, Glu, Gly, or Ser
  VARIANT (16)..(16): Xaa is Ile, Leu, Phe, Ser, Arg, Tyr, Gln, Trp, Asp, Lys, or His
  VARIANT (17)..(17): Xaa is Asp, Ser, Ile, Asn, Glu, Ala, His, Phe, Leu, Gln, Met, Gly, Tyr, or Val
  VARIANT (22)..(22): Xaa is Thr, Val, Cys, Glu, Ser, or Ala
  VARIANT (23)..(23): Xaa is Arg, Phe, Thr, Trp, Glu, Leu, Asn, Cys, Lys, Val, Ser, Gln, Ile, Tyr, His, or Ala
  VARIANT (24)..(24): Xaa is Ser, Pro, Arg, Lys, Asn, Ala, His, Gln, Gly, or Leu
  VARIANT (25)..(25): Xaa is Asp, Gly, Thr, Asn, Ser, Lys, Ala, Ile, Glu, Leu, Gln, Arg, or Tyr
  VARIANT (26)..(26): Xaa is Lys, Val, Ala, Glu, Tyr, Ile, Cys, Leu, Ser, Thr, Gly, Lys, Met, Asp, or Phe
XXXHXXPXSXXXDDSXXNKVLXXXXXN

SEQ ID NO: 27 - protein, 27 aa, Artificial Sequence
  HNH-like domain
  VARIANT (1)..(1): Xaa is Asp or Glu
  VARIANT (3)..(3): Xaa is Asp or Glu
  VARIANT (8)..(8): Xaa is Gln, His, Arg, Lys, Tyr, Ile, Leu, or Trp
  VARIANT (10)..(10): Xaa is Phe, Leu, Val, Lys, Tyr, Met, Ile, Arg, Ala, Glu, Asp, or Gln
  VARIANT (11)..(11): Xaa is Leu, Arg, Thr, Ile, Val, Ser, Cys, Tyr, Lys, Phe, or Gly
  VARIANT (12)..(12): Xaa is Lys, Gln, Tyr, Thr, Phe, Leu, Trp, Met, Ala, Glu, Gly, or Ser
  VARIANT (16)..(16): Xaa is Ile, Leu, Phe, Ser, Arg, Tyr, Gln, Trp, Asp, Lys, or His
  VARIANT (17)..(17): Xaa is Asp, Ser, Ile, Asn, Glu, Ala, His, Phe, Leu, Gln, Met, Gly, Tyr, or Val
  VARIANT (23)..(23): Xaa is Arg, Phe, Thr, Trp, Glu, Leu, Asn, Cys, Lys, Val, Ser, Gln, Ile, Tyr, His, or Ala
  VARIANT (24)..(24): Xaa is Ser, Pro, Arg, Lys, Asn, Ala, His, Gln, Gly, or Leu
  VARIANT (25)..(25): Xaa is Asp, Gly, Thr, Asn, Ser, Lys, Ala, Ile, Glu, Leu, Gln, Arg, or Tyr
  VARIANT (26)..(26): Xaa is Lys, Val, Ala, Glu, Tyr, Ile, Cys, Leu, Ser, Thr, Gly, Lys, Met, Asp, or Phe
XVXHIVPXSXXXDDSXXNKVLTXXXXN

SEQ ID NO: 28 - protein, 27 aa, Artificial Sequence
  HNH-like domain
  VARIANT (2)..(2): Xaa is Ile or Val
  VARIANT (6)..(6): Xaa is Ile or Val
  VARIANT (9)..(9): Xaa is Ala or Ser
  VARIANT (11)..(11): Xaa is Ile or Leu
  VARIANT (12)..(12): Xaa is Lys or Thr
  VARIANT (14)..(14): Xaa is Asp or Asn
  VARIANT (19)..(19): Xaa is Arg, Lys, or Leu
  VARIANT (22)..(22): Xaa is Thr or Val
  VARIANT (23)..(23): Xaa is Ser or Arg
  VARIANT (25)..(25): Xaa is Lys, Asp, or Ala
  VARIANT (26)..(26): Xaa is Glu, Lys, Gly, or Asn
DXDHIXPQXFXXDXSIDNXVLXXSXXN

SEQ ID NO: 29 - RNA, 116 nt, Artificial Sequence
  gRNA
  misc_feature (1)..(20): a, c, u, g, unknown or other
  misc_feature (1)..(20): targeting region
  misc_feature (21)..(42): first complementarity domain
  misc_feature (43)..(46): linking domain
  misc_feature (47)..(70): second complementarity domain
nnnnnnnnnnnnnnnnnnnnguuuuagagcuaugcuguuuuggaaacaaaacagcauagcaaguuaaaauaaggcuaguccguuaucaacuugaaaaaguggcaccgagucggugc

SEQ ID NO: 30 - RNA, 116 nt, Artificial Sequence
  gRNA
  misc_feature (1)..(20): a, c, u, g, unknown or other
  misc_feature (1)..(20): targeting region
  misc_feature (21)..(42): first complementarity domain
  misc_feature (43)..(46): linking domain
  misc_feature (47)..(70): second complementarity domain
nnnnnnnnnnnnnnnnnnnnguauuagagcuaugcuguauuggaaacaauacagcauagcaaguuaauauaaggcuaguccguuaucaacuugaaaaaguggcaccgagucggugc

SEQ ID NO: 31 - RNA, 96 nt, Artificial Sequence
  gRNA
  misc_feature (1)..(20): a, c, u, g, unknown or other
  misc_feature (1)..(20): targeting domain
  misc_feature (21)..(32): first complementarity domain
  misc_feature (33)..(36): linking domain
  misc_feature (37)..(50): second complementarity domain
  misc_feature (51)..(62): proximal domain
nnnnnnnnnnnnnnnnnnnnguuuaagagcuagaaauagcaaguuuaaauaaggcuaguccguuaucaacuugaaaaaguggcaccgagucggugc

SEQ ID NO: 32 - RNA, 47 nt, Artificial Sequence
  gRNA proximal and tail domains derived from S. pyogenes
aaggcuaguccguuaucaacuugaaaaaguggcaccgagucggugcu

SEQ ID NO: 33 - RNA, 49 nt, Artificial Sequence
  gRNA proximal and tail domains
aaggcuaguccguuaucaacuugaaaaaguggcaccgagucgguggugc

SEQ ID NO: 34 - RNA, 51 nt, Artificial Sequence
  gRNA proximal and tail domains
aaggcuaguccguuaucaacuugaaaaaguggcaccgagucggugcggauc

SEQ ID NO: 35 - RNA, 31 nt, Artificial Sequence
  gRNA proximal and tail domains
aaggcuaguccguuaucaacuugaaaaagug

SEQ ID NO: 36 - RNA, 18 nt, Artificial Sequence
  gRNA proximal and tail domains
aaggcuaguccguuauca

SEQ ID NO: 37 - RNA, 12 nt, Artificial Sequence
  gRNA proximal and tail domains
aaggcuaguccg

SEQ ID NO: 38 - RNA, 102 nt, Artificial Sequence
  Unimolecular gRNA derived from S. aureus
  misc_feature (1)..(20): n is a, c, g, or u
  misc_feature (1)..(20): Targeting domain
nnnnnnnnnnnnnnnnnnnnguuuuaguacucuggaaacagaaucuacuaaaacaaggcaaaaugccguguuuaucucgucaacuuguuggcgagauuuuuu

SEQ ID NO: 39 - RNA, 42 nt, Artificial
  Modular gRNA derived from S. pyogenes
  misc_feature (1)..(20): a, c, u, g, unknown or other
  misc_feature (1)..(20): Targeting domain
  misc_feature (21)..(42): First complementarity domain
nnnnnnnnnnnnnnnnnnnnguuuuagagcuaugcuguuuug

SEQ ID NO: 40 - RNA, 85 nt, Artificial Sequence
  Modular gRNA derived from S. pyogenes
  misc_feature (1)..(9): 5' extension domain
  misc_feature (10)..(33): Second complementarity domain
  misc_feature (34)..(45): Proximal domain
  misc_feature (46)..(85): Tail domain
ggaaccauucaaaacagcauagcaaguuaaaauaaggcuaguccguuaucaacuugaaaaaguggcaccgagucggugcuuuuuu

SEQ ID NO: 41 - RNA, 62 nt, Artificial Sequence
  Unimolecular gRNA derived from S. pyogenes
  misc_feature (1)..(20): a, c, u, g, unknown or other
  misc_feature (1)..(20): Targeting domain
  misc_feature (21)..(32): First complementarity domain
  misc_feature (33)..(36): Linking domain
  misc_feature (37)..(50): Second complementarity domain
  misc_feature (51)..(62): Proximal domain
nnnnnnnnnnnnnnnnnnnnguuuuagagcuagaaauagcaaguuaaaauaaggcuaguccg

SEQ ID NO: 42 - RNA, 102 nt, Artificial Sequence
  Unimolecular gRNA derived from S. pyogenes
  misc_feature (1)..(20): a, c, u, g, unknown or other
  misc_feature (1)..(20): Targeting domain
  misc_feature (21)..(32): First complementarity domain
  misc_feature (33)..(36): Linking domain
  misc_feature (37)..(50): Second complementarity domain
  misc_feature (51)..(62): Proximal domain
  misc_feature (63)..(102): Tail domain
nnnnnnnnnnnnnnnnnnnnguuuuagagcuagaaauagcaaguuaaaauaaggcuaguccguuaucaacuugaaaaaguggcaccgagucggugcuuuuuu

SEQ ID NO: 43 - RNA, 75 nt, Artificial Sequence
  Unimolecular gRNA derived from S. pyogenes
  misc_feature (1)..(20): Targeting domain
  misc_feature (1)..(20): a, c, u, g, unknown or other
  misc_feature (21)..(36): First complementarity domain
  misc_feature (37)..(40): Linking domain
  misc_feature (41)..(58): Second complementarity domain
  misc_feature (59)..(70): Proximal domain
  misc_feature (71)..(75): Tail domain
nnnnnnnnnnnnnnnnnnnnguuuuagagcuaugcugaaaagcauagcaaguuaaaauaaggcuaguccguuauc

SEQ ID NO: 44 - RNA, 87 nt, Artificial Sequence
  Unimolecular gRNA derived from S. pyogenes
  misc_feature (1)..(20): a, c, u, g, unknown or other
  misc_feature (1)..(20): Targeting domain
  misc_feature (21)..(32): First complementarity domain
  misc_feature (43)..(46): Linking domain
  misc_feature (57)..(70): Second complementarity domain
  misc_feature (71)..(82): Proximal domain
  misc_feature (83)..(87): Tail domain
nnnnnnnnnnnnnnnnnnnnguuuuagagcuaugcuguuuuggaaacaaaacagcauagcaaguuaaaauaaggcuaguccguuauc

SEQ ID NO: 45 - RNA, 42 nt, Artificial Sequence
  Modular gRNA derived from S. thermophilus
  misc_feature (1)..(20): a, c, u, g, unknown or other
  misc_feature (1)..(20): Targeting domain
  misc_feature (21)..(42): First complementarity domain
nnnnnnnnnnnnnnnnnnnnguuuuagagcuguguuguuucg

SEQ ID NO: 46 - RNA, 78 nt, Artificial Sequence
  Modular gRNA derived from S. thermophilus
  misc_feature (1)..(3): 5' extension domain
  misc_feature (4)..(27): Second complementarity domain
  misc_feature (28)..(40): Proximal domain
  misc_feature (41)..(78): Tail domain
gggcgaaacaacacagcgaguuaaaauaaggcuuaguccguacucaacuugaaaagguggcaccgauucgguguuuuu

SEQ ID NO: 47 - RNA, 85 nt, Artificial Sequence
  Modular gRNA derived from S. pyogenes
gaaccauucaaaacagcauagcaaguuaaaauaaggcuaguccguuaucaacuugaaaaaguggcaccgagucggugcuuuuuuu

SEQ ID NO: 48 - RNA, 96 nt, Artificial Sequence
  gRNA from S. pyogenes
  misc_feature (1)..(20): n is a, c, g, or u
  misc_feature (1)..(20): Targeting domain
nnnnnnnnnnnnnnnnnnnnguuuuagagcuagaaauagcaaguuaaaauaaggcuaguccguuaucaacuugaaaaaguggcaccgagucggugc

SEQ ID NO: 49 - RNA, 96 nt, Artificial Sequence
  gRNA
  misc_feature (1)..(20): n is a, c, g, or u
  misc_feature (1)..(20): Targeting domain
  misc_feature (21)..(32): First complementarity domain
  misc_feature (33)..(36): Linking domain
  misc_feature (37)..(50): Second complementarity domain
  misc_feature (51)..(62): Proximal domain
nnnnnnnnnnnnnnnnnnnnguauuagagcuagaaauagcaaguuaauauaaggcuaguccguuaucaacuugaaaaaguggcaccgagucggugc

SEQ ID NO: 50 - RNA, 104 nt, Artificial Sequence
  gRNA
  misc_feature (1)..(20): n is a, c, g, or u
  misc_feature (1)..(20): Targeting domain
  misc_feature (21)..(36): First complementarity domain
  misc_feature (37)..(40): Linking domain
  misc_feature (41)..(58): Second complementarity domain
nnnnnnnnnnnnnnnnnnnnguuuuagagcuaugcugaaaagcauagcaaguuaaaauaaggcuaguccguuaucaacuugaaaaaguggcaccgagucggugc

SEQ ID NO: 51 - RNA, 106 nt, Artificial Sequence
  gRNA
  misc_feature (1)..(20): n is a, c, g, or u
  misc_feature (1)..(20): Targeting domain
  misc_feature (21)..(37): First complementarity domain
  misc_feature (38)..(41): Linking domain
  misc_feature (42)..(60): Second complementarity domain
nnnnnnnnnnnnnnnnnnnnguuuuagagcuaugcuggaaacagcauagcaaguuaaaauaaggcuaguccguuaucaacuugaaaaaguggcaccgagucggugc

SEQ ID NO: 52 - protein, 12 aa, Peptoniphilus duerdenii
DIGTASVGWAVT

SEQ ID NO: 53 - protein, 12 aa, Treponema denticola
DVGTGSVGWAVT

SEQ ID NO: 54 - protein, 12 aa, S. mutans
DIGTNSVGWAVV

SEQ ID NO: 55 - protein, 12 aa, S. pyogenes
DIGTNSVGWAVI

SEQ ID NO: 56 - protein, 12 aa, L. innocua
DIGTNSVGWAVL

SEQ ID NO: 57 - protein, 12 aa, Flavobacterium branchiophilum FL-15
DLGTNSIGWAVV

SEQ ID NO: 58 - protein, 11 aa, Pedobacter glucosidilyticus
DLGTNSIGWAI

SEQ ID NO: 59 - protein, 12 aa, Bacteroides fragilis, NCTC 9343
DLGTNSIGWALV

SEQ ID NO: 60 - protein, 12 aa, Fusobacterium nucleatum
DIGTNSVGWCVT

SEQ ID NO: 61 - protein, 12 aa, Acidaminococcus sp. D21
DIGTNSVGYAVT

SEQ ID NO: 62 - protein, 12 aa, Coprococcus catus GD-7
DMGTGSLGWAVT

SEQ ID NO: 63 - protein, 12 aa, Oenococcus kitaharae DSM 17330
DIGTSSVGWAAI

SEQ ID NO: 64 - protein, 12 aa, Catenibacterium mitsuokai DSM 15897
DLGTGSVGWAVV

SEQ ID NO: 65 - protein, 12 aa, Mycoplasma gallisepticum str. F
DLGVGSVGWAIV

SEQ ID NO: 66 - protein, 12 aa, Mycoplasma ovipneumoniae SC01
DLGIASIGWAII

SEQ ID NO: 67 - protein, 12 aa, Mycoplasma canis PG 14
DLGIASVGWAIV

SEQ ID NO: 68 - protein, 12 aa, Mycoplasma synoviae 53
DLGVASVGWSIV

SEQ ID NO: 69 - protein, 12 aa, Eubacterium rectale
DIGIASVGWAIL

SEQ ID NO: 70 - protein, 12 aa, Enterococcus faecalis TX0012
DLGISSVGWSVI

SEQ ID NO: 71 - protein, 12 aa, Ilyobacter polytropus DSM 2926
DIGIASVGWSVI

SEQ ID NO: 72 - protein, 12 aa, Ruminococcus albus 8
DVGIGSIGWAVI

SEQ ID NO: 73 - protein, 12 aa, Elusimicrobium minutum Pei191
DLGVGSIGFAIV

SEQ ID NO: 74 - protein, 12 aa, Akkermansia muciniphila
DIGYASIGWAVI

SEQ ID NO: 75 - protein, 12 aa, Prevotella ruminicola
DTGTNSLGWAIV

SEQ ID NO: 76 - protein, 12 aa, Cand. Puniceispirillum marinum
DLGTNSIGWCLL

SEQ ID NO: 77 - protein, 12 aa, Rhodospirillum rubrum
DIGTDSLGWAVF

SEQ ID NO: 78 - protein, 12 aa, Lactobacillus rhamnosus GG
DIGSNSIGFAVV

SEQ ID NO: 79 - protein, 12 aa, Sphaerochaeta globus str. Buddy
DLGVGSIGVAVA

SEQ ID NO: 80 - protein, 12 aa, Rhodopseudomonas palustris
DLGIASCGWGVV

SEQ ID NO: 81 - protein, 12 aa, Mycoplasma mobile 163K
DLGIASVGWCLT

SEQ ID NO: 82 - protein, 12 aa, Streptococcus thermophilus LMD-9
DIGIGSVGVGIL

SEQ ID NO: 83 - protein, 12 aa, Staphylococcus lugdunensis M23590
DIGITSVGYGLI

SEQ ID NO: 84 - protein, 12 aa, Eubacterium dolichum DSM 3991
DIGITSVGFGII

SEQ ID NO: 85 - protein, 12 aa, Lactobacillus coryniformis KCTC 3535
DVGITSTGYAVL

SEQ ID NO: 86 - protein, 12 aa, Nitratifractor salsuginis DSM 16511
DLGITSFGYAIL

SEQ ID NO: 87 - protein, 12 aa, Bifidobacterium bifidum S17
DIGNASVGWSAF

SEQ ID NO: 88 - protein, 12 aa, Lactobacillus gasseri
DVGTNSCGWVAM

SEQ ID NO: 89 - protein, 12 aa, Acidothermus cellulolyticus 11B
DVGERSIGLAAV

SEQ ID NO: 90 - protein, 12 aa, Bifidobacterium longum DJO10A
DVGLNSVGLAAV

SEQ ID NO: 91 - protein, 12 aa, Bifidobacterium dentium
DVGLMSVGLAAI

SEQ ID NO: 92 - protein, 12 aa, Corynebacterium diphtheriae
DVGTFSVGLAAI

SEQ ID NO: 93 - protein, 12 aa, Staphylococcus pseudintermedius ED99
DIGTGSVGYACM

SEQ ID NO: 94 - protein, 12 aa, Capnocytophaga ochracea
DLGTTSIGFAHI

SEQ ID NO: 95 - protein, 12 aa, Prevotella denticola
DLGTNSIGSSVR

SEQ ID NO: 96 - protein, 12 aa, Ralstonia solanacearum
DIGTNSIGWAVI

SEQ ID NO: 97 - protein, 12 aa, Pasteurella multocida str. Pm70
DLGIASVGWAVV

SEQ ID NO: 98 - protein, 12 aa, Comamonas granuli
DIGIASVGWAVL

SEQ ID NO: 99 - protein, 12 aa, Helicobacter mustelae 12198
DIGIASIGWAVI

SEQ ID NO: 100 - protein, 12 aa, Agathobacter rectalis
DIGIASVGWAII

SEQ ID NO: 101 - protein, 12 aa, Clostridium cellulolyticum H10
DVGIASVGWAVI

SEQ ID NO: 102 - protein, 11 aa, Methylophilus sp. OH31
DIGIASVGWAL

SEQ ID NO: 103 - protein, 12 aa, Neisseria meningitidis
DIGIASVGWAMV

SEQ ID NO: 104 - protein, 12 aa, Clostridium perfringens
DIGITSVGWAVI

SEQ ID NO: 105 - protein, 12 aa, Wolinella succinogenes DSM 1740
DLGISSLGWAIV

SEQ ID NO: 106 - protein, 12 aa, Azospirillum sp. B510
DLGTNSIGWGLL

SEQ ID NO: 107 - protein, 12 aa, Verminephrobacter eiseniae
DLGSTSLGWAIF

SEQ ID NO: 108 - protein, 12 aa, Campylobacter jejuni, NCTC 11168
DIGISSIGWAFS

SEQ ID NO: 109 - protein, 12 aa, Parvibaculum lavamentivorans DS-1
DIGTTSIGFSVI

SEQ ID NO: 110 - protein, 12 aa, Dinoroseobacter shibae DFL 12
DIGTSSIGWWLY

SEQ ID NO: 111 - protein, 12 aa, Nitrobacter hamburgensis X14
DLGSNSLGWFVT

SEQ ID NO: 112 - protein, 12 aa, Bradyrhizobium sp. BTAi1
DLGANSLGWFVV

SEQ ID NO: 113 - protein, 15 aa, Bacillus cereus
DIGLRIGITSCGWSI

SEQ ID NO: 114 - protein, 12 aa, Sutterella wadsworthensis
DMGAKYTGVFYA

SEQ ID NO: 115 - protein, 12 aa, Wolinella succinogenes DSM 1740
DLGGKNTGFFSF

SEQ ID NO: 116 - protein, 12 aa, Francisella tularensis
DLGVKNTGVFSA

SEQ ID NO: 117 - protein, 12 aa, Gamma proteobacterium HTCC5015
DLGAKFTGVALY

SEQ ID NO: 118 - protein, 12 aa, Legionella pneumophila str. Paris
DLGGKFTGVCLS

SEQ ID NO: 119 - protein, 12 aa, Parasutterella excrementihominis
DLGGTYTGTFIT

SEQ ID NO: 120 - protein, 12 aa, S. thermophilus
DIGTNSVGWAVT

SEQ ID NO: 121 - protein, 12 aa, Eubacterium yurii
DVGTNSVGWAVT

SEQ ID NO: 122 - protein, 12 aa, Butyrivibrio hungatei
DMGTNSVGWAVT

SEQ ID NO: 123 - protein, 12 aa, Solobacterium moorei F0204
DVGTSSVGWAVT

SEQ ID NO: 124 - protein, 27 aa, Treponema denticola
DIDHIYPQSKIKDDSISNRVLVCSSCN

SEQ ID NO: 125 - protein, 27 aa, Coprococcus catus GD-7
DIDHIYPQSKTMDDSLNNRVLVKKNYN

SEQ ID NO: 126 - protein, 27 aa, Peptoniphilus duerdenii
DQDHIYPKSKIYDDSLENRVLVKKNLN

SEQ ID NO: 127 - protein, 27 aa, Catenibacterium mitsuokai DSM 15897
QIDHIVPQSLVKDDSFDNRVLVVPSEN

SEQ ID NO: 128 - protein, 27 aa, S. mutans
DIDHIIPQAFIKDNSIDNRVLTSSKEN

SEQ ID NO: 129 - protein, 27 aa, S. thermophilus
DIDHIIPQAFLKDNSIDNKVLVSSASN

SEQ ID NO: 130 - protein, 27 aa, Oenococcus kitaharae DSM 17330
DIDHIIPQAYTKDNSLDNRVLVSNITN

SEQ ID NO: 131 - protein, 27 aa, L. inocua
DIDHIVPQSFITDNSIDNLVLTSSAGN

SEQ ID NO: 132 - protein, 27 aa, S. pyogenes
DVDHIVPQSFLKDDSIDNKVLTRSDKN

SEQ ID NO: 133 - protein, 27 aa, Acidaminococcus sp. D21
NIDHIYPQSMVKDDSLDNKVLVQSEIN

SEQ ID NO: 134 - protein, 27 aa, Lactobacillus rhamnosus GG
DIDHILPQSLIKDDSLDNRVLVNATIN

SEQ ID NO: 135 - protein, 27 aa, Lactobacillus gasseri
DIDHILPQSFIKDDSLENRVLVKKAVN

SEQ ID NO: 136 - protein, 27 aa, Staphylococcus pseudintermedius ED99
EVDHIFPRSFIKDDSIDNKVLVIKKMN

SEQ ID NO: 137 - protein, 27 aa, Olsenella uli
EVDHIIPRSYIKDDSFENKVLVYREEN

SEQ ID NO: 138 - protein, 27 aa, Bifidobacterium bifidum S17
DIDHIIPQAVTQNDSIDNRVLVARAEN

SEQ ID NO: 139 - protein, 27 aa, Mycoplasma gallisepticum str. F
EIDHIIPYSISFDDSSSNKLLVLAESN

SEQ ID NO: 140 - protein, 27 aa, Mycoplasma canis PG 14
EIDHIIPYSLCFDDSSANKVLVHKQSN

SEQ ID NO: 141 - protein, 27 aa, Ilyobacter polytropus DSM 2926
DIDHIIPYSRSMDDSYSNKVLVLSGEN

SEQ ID NO: 142 - protein, 27 aa, Uncultured Termite group 1 bacterium
DIDHIIPYSKSMDDSFNNKVLCLAEEN

SEQ ID NO: 143 - protein, 27 aa, Campylobacter jejuni
EIDHIYPYSRSFDDSYMNKVLVFTKQN

SEQ ID NO: 144 - protein, 27 aa, Clostridium cellulolyticum H10
QIDHIYPYSRSMDDSYMNKVLVLTDEN

SEQ ID NO: 145 - protein, 27 aa, Clostridium perfringens
EIDHIIPFSRSFDDSLSNKILVLGSEN

SEQ ID NO: 146 - protein, 27 aa, N. meningitides
EIDHALPFSRTWDDSFNNKVLVLGSEN

SEQ ID NO: 147 - protein, 27 aa, Pasteurella multocida str. Pm70
EIDHALPFSRTWDDSFNNKVLVLASEN

SEQ ID NO: 148 - protein, 27 aa, Enterococcus faecalis TX0012
EIDHIIPISISLDDSINNKVLVLSKAN

SEQ ID NO: 149 - protein, 27 aa, Eubacterium dolichum DSM 3991
EVDHIIPISISLDDSITNKVLVTHREN

SEQ ID NO: 150 - protein, 27 aa, Acidovorax ebreus
QVDHALPYSRSYDDSKNNKVLVLTHEN

SEQ ID NO: 151 - protein, 27 aa, Streptococcus thermophilus LMD-9
EVDHILPLSITFDDSLANKVLVYATAN

SEQ ID NO: 152 - protein, 27 aa, Eubacterium rectale
EIDHIIPRSISFDDARSNKVLVYRSEN

SEQ ID NO: 153 - protein, 27 aa, Staphylococcus lugdunensis M23590
EVDHIIPRSVSFDNSYHNKVLVKQSEN

SEQ ID NO: 154 - protein, 27 aa, Roseburia intestinalis
DIDHILPYSITFDDSFRNKVLVTSQEN

SEQ ID NO: 155 - protein, 27 aa, Wolinella succinogenes DSM 1740
EIDHILPRSRSADDSFANKVLCLARAN

SEQ ID NO: 156 - protein, 27 aa, Cand. Puniceispirillum marinum
EIEHLLPFSLTLDDSMANKTVCFRQAN

SEQ ID NO: 157 - protein, 27 aa, Azospirillum sp. B510
DIDHILPFSVSLDDSAANKVVCLREAN

SEQ ID NO: 158 - protein, 27 aa, Bradyrhizobium sp. BTAi1
DIDHLIPFSISWDDSAANKVVCMRYAN

SEQ ID NO: 159 - protein, 27 aa, Nitrobacter hamburgensis X14
DIDHILPVAMTLDDSPANKIICMRYAN

SEQ ID NO: 160 - protein, 27 aa, Dinoroseobacter shibae
DVDHILPYSRTLDDSFPNRTLCLREAN

SEQ ID NO: 161 - protein, 27 aa, Verminephrobacter eiseniae
EIEHILPFSRTLDDSLNNRTVAMRRAN

SEQ ID NO: 162 - protein, 27 aa, Lactobacillus coryniformis KCTC 3535
EVDHIIPYSISWDDSYTNKVLTSAKCN

SEQ ID NO: 163 - protein, 27 aa, Rhodopseudomonas palustris
QVDHILPWSRFGDDSYLNKTLCTARSN

SEQ ID NO: 164 - protein, 27 aa, Ralstonia syzygii R24
QVDHILPFSKTLDDSFANKVLAQHDAN

SEQ ID NO: 165 - protein, 27 aa, Helicobacter mustelae 12198
QIDHAFPLSRSLDDSQSNKVLCLTSSN

SEQ ID NO: 166 - protein, 27 aa, Mycoplasma mobile 163K
DIDHIVPRSISFDDSFSNLVIVNKLDN

SEQ ID NO: 167 - protein, 27 aa, Mycoplasma ovipneumoniae SC01
EIEHIIPYSMSYDNSQANKILTEKAEN

SEQ ID NO: 168 - protein, 27 aa, Mycoplasma synoviae 53
EIDHVIPYSKSADDSWFNKLLVKKSTN

SEQ ID NO: 169 - protein, 27 aa, Aminomonas paucivorans DSM 12260
EMDHILPYSRSLDNGWHNRVLVHGKDN

SEQ ID NO: 170 - protein, 27 aa, Ruminococcus albus 8
EVDHIVPYSLILDNTINNKALVYAEEN

SEQ ID NO: 171 - protein, 27 aa, Fibrobacter succinogenes
EIEHVIPQSLYFDDSFSNKVICEAEVN

SEQ ID NO: 172 - protein, 27 aa, Bacteroides fragilis, NCTC 9343
DIEHIIPQARLFDDSFSNKTLEARSVN

SEQ ID NO: 173 - protein, 27 aa, Capnocytophaga sputigena
EIEHIVPKARVFDDSFSNKTLTFHRIN

SEQ ID NO: 174 - protein, 28 aa, Finegoldia magna
DKDHIIPQSMKKDDSIINNLVLVNKNAN

SEQ ID NO: 175 - protein, 27 aa, Parvibaculum lavamentivorans DS-1
EVEHIWPRSRSFDNSPRNKTLCRKDVN

SEQ ID NO: 176 - protein, 27 aa, Bacillus cereus
IVNHIIPYNRSFDDTYHNRVLTLTETK

SEQ ID NO: 177 - protein, 27 aa, Prevotella micans
DMEHTIPKSISFDNSDQNLTLCESYYN

SEQ ID NO: 178 - protein, 27 aa, Prevotella ruminicola
DIEHTIPRSAGGDSTKMNLTLCSSRFN

SEQ ID NO: 179 - protein, 27 aa, Flavobacterium columnare
DIEHTIPRSISQDNSQMNKTLCSLKFN

SEQ ID NO: 180 - protein, 27 aa, Rhodospirillum rubrum
DIDHVIPLARGGRDSLDNMVLCQSDAN

SEQ ID NO: 181 - protein, 27 aa, Elusimicrobium minutum Pei191
DIEHLFPIAESEDNGRNNLVISHSACN

SEQ ID NO: 182 - protein, 27 aa, Sphaerochaeta globus str. Buddy
DVDHIFPRDDTADNSYGNKVVAHRQCN

SEQ ID NO: 183 - protein, 27 aa, Nitratifractor salsuginis DSM 16511
DIEHIVPQSLGGLSTDYNTIVTLKSVN

SEQ ID NO: 184 - protein, 27 aa, Acidothermus cellulolyticus 11B
ELDHIVPRTDGGSNRHENLAITCGACN

SEQ ID NO: 185 - protein, 28 aa, Bifidobacterium longum DJO10A
EMDHIVPRKGVGSTNTRTNFAAVCAECN

SEQ ID NO: 186 - protein, 28 aa, Bifidobacterium dentium
EMDHIVPRKGVGSTNTRVNLAAACAACN

SEQ ID NO: 187 - protein, 28 aa, Corynebacterium diphtheriae
EMDHIVPRAGQGSTNTRENLVAVCHRCN

SEQ ID NO: 188 - protein, 33 aa, Sutterella wadsworthensis
EIDHILPRSLIKDARGIVFNAEPNLIYASSRGN

SEQ ID NO: 189 - protein, 33 aa, Gamma proteobacterium HTCC5015
EIDHIIPRSLTGRTKKTVFNSEANLIYCSSKGN

SEQ ID NO: 190 - protein, 33 aa, Parasutterella excrementihominis
EIDHIIPRSLTLKKSESIYNSEVNLIFVSAQGN

SEQ ID NO: 191 - protein, 33 aa, Legionella pneumophila str. Paris
EIDHIYPRSLSKKHFGVIFNSEVNLIYCSSQGN

SEQ ID NO: 192 - protein, 33 aa, Wolinella succinogenes DSM 1740
EIDHILPRSHTLKIYGTVFNPEGNLIYVHQKCN

SEQ ID NO: 193 - protein, 30 aa, Francisella tularensis
ELDHIIPRSHKKYGTLNDEANLICVTRGDN

SEQ ID NO: 194 - protein, 27 aa, Akkermansia muciniphila
ELEHIVPHSFRQSNALSSLVLTWPGVN

SEQ ID NO: 195 - protein, 27 aa, Solobacterium moorei F0204
DIDHIYPRSKIKDDSITNRVLVEKDIN

SEQ ID NO: 196 - protein, 28 aa, Veillonella atypica ACS-134-V-Col7a
YDIDHIYPRSLTKDDSFDNLVLCERTAN

SEQ ID NO: 197 - protein, 28 aa, Fusobacterium nucleatum
DIDHIYPRSKVIKDDSFDNLVLVLKNEN

SEQ ID NO: 198 - protein, 27 aa, Filifactor alocis
DRDHIYPQSKIKDDSIDNLVLVNKTYN

SEQ ID NO: 199 - DNA, 5 bp, Streptococcus thermophilus
  misc_feature (1)..(1): Any nucleotide (e.g., A, G, C, or T)
  misc_feature (4)..(4): Any nucleotide (e.g., A, G, C, or T)
nggng

SEQ ID NO: 200 - DNA, 7 bp, Streptococcus thermophilus
  misc_feature (1)..(1): Any nucleotide (e.g., A, G, C, or T)
  misc_feature (2)..(2): Any nucleotide (e.g., A, G, C, or T)
  misc_feature (7)..(7): A or T
nnagaaw

SEQ ID NO: 201 - DNA, 4 bp, Streptococcus mutans
  misc_feature (1)..(1): Any nucleotide (e.g., A, G, C, or T)
  misc_feature (4)..(4): A or G
naar

SEQ ID NO: 202 - DNA, 5 bp, Staphylococcus aureus
  misc_feature (1)..(1): Any nucleotide (e.g., A, G, C, or T)
  misc_feature (2)..(2): Any nucleotide (e.g., A, G, C, or T)
  misc_feature (4)..(4): A or G
  misc_feature (5)..(5): A or G
nngrr

SEQ ID NO: 203 - DNA, 6 bp, Staphylococcus aureus
  misc_feature (1)..(1): Any nucleotide (e.g., A, G, C, or T)
  misc_feature (2)..(2): Any nucleotide (e.g., A, G, C, or T)
  misc_feature (4)..(4): A or G
  misc_feature (5)..(5): A or G
  misc_feature (6)..(6): Any nucleotide (e.g., A, G, C, or T)
nngrrn

SEQ ID NO: 204 - DNA, 6 bp, Staphylococcus aureus
  misc_feature (1)..(1): Any nucleotide (e.g., A, G, C, or T)
  misc_feature (2)..(2): Any nucleotide (e.g., A, G, C, or T)
  misc_feature (4)..(4): A or G
  misc_feature (5)..(5): A or G
nngrrt

SEQ ID NO: 205 - DNA, 6 bp, Staphylococcus aureus
  misc_feature (1)..(1): Any nucleotide (e.g., A, G, C, or T)
  misc_feature (2)..(2): Any nucleotide (e.g., A, G, C, or T)
  misc_feature (4)..(4): A or G
  misc_feature (5)..(5): A or G
  misc_feature (6)..(6): A, G, or C
nngrrv

SEQ ID NO: 206-250 - skipped (45 entries)

SEQ ID NO: 251 - RNA, 17 nt, Artificial Sequence
  Targeting domain
gaaggaaacuagcuaaa

SEQ ID NO: 252 - RNA, 20 nt, Artificial Sequence
  Targeting domain
ggagaaggaaacuagcuaaa

SEQ ID NO: 253 - RNA, 20 nt, Artificial Sequence
  Targeting domain
gggagaaggaaacuagcuaa

SEQ ID NO: 254 - RNA, 20 nt, Artificial Sequence
  Targeting domain
guauccucuaugaugggaga

SEQ ID NO: 255 - RNA, 20 nt, Artificial Sequence
  Targeting domain
guuuccuucucccaucauag

SEQ ID NO: 256 - RNA, 20 nt, Artificial Sequence
  Targeting domain
guccugguauccucuaugau

SEQ ID NO: 257 - RNA, 17 nt, Artificial Sequence
  Targeting domain
agaaggaaacuagcuaa

SEQ ID NO: 258 - RNA, 17 nt, Artificial Sequence
  Targeting domain
uccucuaugaugggaga

SEQ ID NO: 259 - RNA, 17 nt, Artificial Sequence
  Targeting domain
ccugguauccucuauga

SEQ ID NO: 260 - RNA, 17 nt, Artificial Sequence
  Targeting domain
ccaucauagaggauacc

SEQ ID NO: 261 - RNA, 17 nt, Artificial Sequence
  Targeting domain
uccuucucccaucauag

SEQ ID NO: 262 - RNA, 17 nt, Artificial Sequence
  Targeting domain
uagcaguauccucuugg

SEQ ID NO: 263 - RNA, 17 nt, Artificial Sequence
  Targeting domain
uuagcaguauccucuug

SEQ ID NO: 264 - RNA, 17 nt, Artificial Sequence
  Targeting domain
aacuggaaugacugaau

SEQ ID NO: 265 - RNA, 17 nt, Artificial Sequence
  Targeting domain
cugguauccucuaugau

SEQ ID NO: 266 - RNA, 17 nt, Artificial Sequence
  Targeting domain
aauuagcaguauccucu

SEQ ID NO: 267 - RNA, 17 nt, Artificial Sequence
  Targeting domain
auuagcaguauccucuu

SEQ ID NO: 268 - RNA, 20 nt, Artificial Sequence
  Targeting domain
aguccugguauccucuauga

SEQ ID NO: 269 - RNA, 20 nt, Artificial Sequence
  Targeting domain
cucccaucauagaggauacc

SEQ ID NO: 270 - RNA, 20 nt, Artificial Sequence
  Targeting domain
aauuagcaguauccucuugg

SEQ ID NO: 271 - RNA, 20 nt, Artificial Sequence
  Targeting domain
aaauuagcaguauccucuug

SEQ ID NO: 272 - RNA, 20 nt, Artificial Sequence
  Targeting domain
aaaaacuggaaugacugaau

SEQ ID NO: 273 - RNA, 20 nt, Artificial Sequence
  Targeting domain
aaaaauuagcaguauccucu

SEQ ID NO: 274 - RNA, 20 nt, Artificial Sequence
  Targeting domain
aaaauuagcaguauccucuu

SEQ ID NO: 275 - RNA, 17 nt, Artificial Sequence
  Targeting domain
gaaucggaacaaggcaa

SEQ ID NO: 276 - RNA, 17 nt, Artificial Sequence
  Targeting domain
gaccaauagccuugaca

SEQ ID NO: 277 - RNA, 17 nt, Artificial Sequence
  Targeting domain
ggcuauuggucaaggca

SEQ ID NO: 278 - RNA, 17 nt, Artificial Sequence
  Targeting domain
gucaaggcuauugguca

SEQ ID NO: 279 - RNA, 17 nt, Artificial Sequence
  Targeting domain
guguguggaacugcuga

SEQ ID NO: 280 - RNA, 17 nt, Artificial Sequence
  Targeting domain
gggccggcggcuggcua

SEQ ID NO: 281 - RNA, 17 nt, Artificial Sequence
  Targeting domain
gaguauccagugaggcc

SEQ ID NO: 282 - RNA, 17 nt, Artificial Sequence
  Targeting domain
gcugacaaaagaagucc

SEQ ID NO: 283 - RNA, 17 nt, Artificial Sequence
  Targeting domain
ggccaggggccggcggc

SEQ ID NO: 284 - RNA, 17 nt, Artificial Sequence
  Targeting domain
gggaaggggcccccaag

SEQ ID NO: 285 - RNA, 17 nt, Artificial Sequence
  Targeting domain
gagauaguguggggaag

SEQ ID NO: 286 - RNA, 17 nt, Artificial Sequence
  Targeting domain
guauccagugaggccag

SEQ ID NO: 287 - RNA, 17 nt, Artificial Sequence
  Targeting domain
gugaggccaggggccgg

SEQ ID NO: 288 - RNA, 17 nt, Artificial Sequence
  Targeting domain
gcuggccaacccauggg

SEQ ID NO: 289 - RNA, 17 nt, Artificial Sequence
  Targeting domain
ggcuaaacuccacccau

SEQ ID NO: 290 - RNA, 17 nt, Artificial Sequence
  Targeting domain
ggauacucuaagacuau

SEQ ID NO: 291 - RNA, 17 nt, Artificial Sequence
  Targeting domain
ggggccggcggcuggcu

SEQ ID NO: 292 - RNA, 20 nt, Artificial Sequence
  Targeting domain
ggcuagggaugaagaauaaa

SEQ ID NO: 293 - RNA, 20 nt, Artificial Sequence
  Targeting domain
gaguguguggaacugcugaa

SEQ ID NO: 294 - RNA, 20 nt, Artificial Sequence
  Targeting domain
ggaaugacugaaucggaaca

SEQ ID NO: 295 - RNA, 20 nt, Artificial Sequence
  Targeting domain
gcauugagauagugugggga

SEQ ID NO: 296 - RNA, 20 nt, Artificial Sequence
  Targeting domain
gcuauuggucaaggcaaggc

SEQ ID NO: 297 - RNA, 20 nt, Artificial Sequence
  Targeting domain
guggggaaggggcccccaag

SEQ ID NO: 298 - RNA, 20 nt, Artificial Sequence
  Targeting domain
ggcaaggcuggccaacccau

SEQ ID NO: 299 - RNA, 20 nt, Artificial Sequence
  Targeting domain
guuugccuugucaaggcuau

SEQ ID NO: 300 - RNA, 20 nt, Artificial Sequence
  Targeting domain
gcuaaacuccacccaugggu

SEQ ID NO: 301 - RNA, 17 nt, Artificial Sequence
  Targeting domain
caaauaucugucugaaa

SEQ ID NO: 302 - RNA, 17 nt, Artificial Sequence
  Targeting domain
uagggaugaagaauaaa

SEQ ID NO: 303 - RNA, 17 nt, Artificial Sequence
  Targeting domain
ugagauaguguggggaa

SEQ ID NO: 304 - RNA, 17 nt, Artificial Sequence
  Targeting domain
uguguggaacugcugaa

SEQ ID NO: 305 - RNA, 17 nt, Artificial Sequence
  Targeting domain
augacugaaucggaaca

SEQ ID NO: 306 - RNA, 17 nt, Artificial Sequence
  Targeting domain
caaggcuggccaaccca

SEQ ID NO: 307 - RNA, 17 nt, Artificial Sequence
  Targeting domain
uggcuaaacuccaccca

SEQ ID NO: 308 - RNA, 17 nt, Artificial Sequence
  Targeting domain
uggguggaguuuagcca

SEQ ID NO: 309 - RNA, 17 nt, Artificial Sequence
  Targeting domain
aguauccagugaggcca

SEQ ID NO: 310 - RNA, 17 nt, Artificial Sequence
  Targeting domain
ucaaguuugccuuguca

SEQ ID NO: 311 - RNA, 17 nt, Artificial Sequence
  Targeting domain
uugagauagugugggga

SEQ ID NO: 312 - RNA, 17 nt, Artificial Sequence
  Targeting domain
auaaauuagagaaaaac

SEQ ID NO: 313 - RNA, 17 nt, Artificial Sequence
  Targeting domain
ccggccccuggccucac

SEQ ID NO: 314 - RNA, 17 nt, Artificial Sequence
  Targeting domain
agccagccgccggcccc

SEQ ID NO: 315 - RNA, 17 nt, Artificial Sequence
  Targeting domain
cugucugaaacgguccc

SEQ ID NO: 316 - RNA, 17 nt, Artificial Sequence
  Targeting domain
auggguggaguuuagcc

SEQ ID NO: 317 - RNA, 17 nt, Artificial Sequence
  Targeting domain
caucccuagccagccgc

SEQ ID NO: 318 - RNA, 17 nt, Artificial Sequence
  Targeting domain
auuggucaaggcaaggc

SEQ ID NO: 319 - RNA, 17 nt, Artificial Sequence
  Targeting domain
ccagugaggccaggggc

SEQ ID NO: 320 - RNA, 17 nt, Artificial Sequence
  Targeting domain
uuccacacacucgcuuc

SEQ ID NO: 321 - RNA, 17 nt, Artificial Sequence
  Targeting domain
cgcuucuggaacgucug

SEQ ID NO: 322 - RNA, 17 nt, Artificial Sequence
  Targeting domain
ucuuagaguauccagug

SEQ ID NO: 323 - RNA, 17 nt, Artificial Sequence
  Targeting domain
uuugcauugagauagug

SEQ ID NO: 324 - RNA, 17 nt, Artificial Sequence
  Targeting domain
uuccagaagcgagugug

SEQ ID NO: 325 - RNA, 17 nt, Artificial Sequence
  Targeting domain
ugcauugagauagugug

SEQ ID NO: 326 - RNA, 17 nt, Artificial Sequence
  Targeting domain
aaggcuggccaacccau

SEQ ID NO: 327 - RNA, 17 nt, Artificial Sequence
  Targeting domain
ugccuugucaaggcuau

SEQ ID NO: 328 - RNA, 17 nt, Artificial Sequence
  Targeting domain
aaacuccacccaugggu

SEQ ID NO: 329 - RNA, 17 nt, Artificial Sequence
  Targeting domain
uugcauugagauagugu

SEQ ID NO: 330 - RNA, 20 nt, Artificial Sequence
  Targeting domain
augcaaauaucugucugaaa

SEQ ID NO: 331 - RNA, 20 nt, Artificial Sequence
  Targeting domain
acugaaucggaacaaggcaa

SEQ ID NO: 332 - RNA, 20 nt, Artificial Sequence
  Targeting domain
cauugagauaguguggggaa

SEQ ID NO: 333 - RNA, 20 nt, Artificial Sequence
  Targeting domain
cuugaccaauagccuugaca

SEQ ID NO: 334 - RNA, 20 nt, Artificial Sequence
  Targeting domain
aggcaaggcuggccaaccca

SEQ ID NO: 335 - RNA, 20 nt, Artificial Sequence
  Targeting domain
cccuggcuaaacuccaccca

SEQ ID NO: 336 - RNA, 20 nt, Artificial Sequence
  Targeting domain
ccauggguggaguuuagcca

SEQ ID NO: 337 - RNA, 20 nt, Artificial Sequence
  Targeting domain
uagaguauccagugaggcca

SEQ ID NO: 338 - RNA, 20 nt, Artificial Sequence
  Targeting domain
caaggcuauuggucaaggca

SEQ ID NO: 339 - RNA, 20 nt, Artificial Sequence
  Targeting domain
cuugucaaggcuauugguca

SEQ ID NO: 340 - RNA, 20 nt, Artificial Sequence
  Targeting domain
uggucaaguuugccuuguca

SEQ ID NO: 341 - RNA, 20 nt, Artificial Sequence
  Targeting domain
cgaguguguggaacugcuga

SEQ ID NO: 342 - RNA, 20 nt, Artificial Sequence
  Targeting domain
caggggccggcggcuggcua

SEQ ID NO: 343 - RNA, 20 nt, Artificial Sequence
  Targeting domain
agaauaaauuagagaaaaac

SEQ ID NO: 344 - RNA, 20 nt, Artificial Sequence
  Targeting domain
ccgccggccccuggccucac

SEQ ID NO: 345 - RNA, 20 nt, Artificial Sequence
  Targeting domain
ccuagccagccgccggcccc

SEQ ID NO: 346 - RNA, 20 nt, Artificial Sequence
  Targeting domain
uaucugucugaaacgguccc

SEQ ID NO: 347 - RNA, 20 nt, Artificial Sequence
  Targeting domain
cccauggguggaguuuagcc

SEQ ID NO: 348 - RNA, 20 nt, Artificial Sequence
  Targeting domain
uuagaguauccagugaggcc

SEQ ID NO: 349 - RNA, 20 nt, Artificial Sequence
  Targeting domain
acggcugacaaaagaagucc

SEQ ID NO: 350 - RNA, 20 nt, Artificial Sequence
  Targeting domain
cuucaucccuagccagccgc

SEQ ID NO: 351 - RNA, 20 nt, Artificial Sequence
  Targeting domain
ugaggccaggggccggcggc

SEQ ID NO: 352 - RNA, 20 nt, Artificial Sequence
  Targeting domain
uauccagugaggccaggggc

SEQ ID NO: 353 - RNA, 20 nt, Artificial Sequence
  Targeting domain
caguuccacacacucgcuuc

SEQ ID NO: 354 - RNA, 20 nt, Artificial Sequence
  Targeting domain
auugagauaguguggggaag

SEQ ID NO: 355 - RNA, 20 nt, Artificial Sequence
  Targeting domain
agaguauccagugaggccag

SEQ ID NO: 356 - RNA, 20 nt, Artificial Sequence
  Targeting domain
ccagugaggccaggggccgg

SEQ ID NO: 357 - RNA, 20 nt, Artificial Sequence
  Targeting domain
aaggcuggccaacccauggg

SEQ ID NO: 358 - RNA, 20 nt, Artificial Sequence
  Targeting domain
acucgcuucuggaacgucug

SEQ ID NO: 359 - RNA, 20 nt, Artificial Sequence
  Targeting domain
uagucuuagaguauccagug

SEQ ID NO: 360 - RNA, 20 nt, Artificial Sequence
  Targeting domain
auauuugcauugagauagug

SEQ ID NO: 361 - RNA, 20 nt, Artificial Sequence
  Targeting domain
acguuccagaagcgagugug

SEQ ID NO: 362 - RNA, 20 nt, Artificial Sequence
  Targeting domain
auuugcauugagauagugug

SEQ ID NO: 363 - RNA, 20 nt, Artificial Sequence
  Targeting domain
ccuggcuaaacuccacccau

SEQ ID NO: 364 - RNA, 20 nt, Artificial Sequence
  Targeting domain
acuggauacucuaagacuau

SEQ ID NO: 365 - RNA, 20 nt, Artificial Sequence
  Targeting domain
ccaggggccggcggcuggcu

SEQ ID NO: 366 - RNA, 20 nt, Artificial Sequence
  Targeting domain
uauuugcauugagauagugu

SEQ ID NO: 367 - RNA, 19 nt, Artificial Sequence
  Targeting domain
guuuccuucucccaucaua

SEQ ID NO: 368 - RNA, 23 nt, Artificial Sequence
  Targeting domain
gcuaguuuccuucucccaucaua

SEQ ID NO: 369 - RNA, 19 nt, Artificial Sequence
  Targeting domain
gaauaaauuagagaaaaac

SEQ ID NO: 370 - RNA, 22 nt, Artificial Sequence
  Targeting domain
gaagaauaaauuagagaaaaac

SEQ ID NO: 371 - RNA, 23 nt, Artificial Sequence
  Targeting domain
ggaagaauaaauuagagaaaaac

SEQ ID NO: 372 - RNA, 24 nt, Artificial Sequence
  Targeting domain
gggaagaauaaauuagagaaaaac

SEQ ID NO: 373 - RNA, 20 nt, Artificial Sequence
  Targeting domain
gaaggaaacuagcuaaaggg

SEQ ID NO: 374 - RNA, 22 nt, Artificial Sequence
  Targeting domain
gagaaggaaacuagcuaaaggg

SEQ ID NO: 375 - RNA, 23 nt, Artificial Sequence
  Targeting domain
ggagaaggaaacuagcuaaaggg

SEQ ID NO: 376 - RNA, 24 nt, Artificial Sequence
  Targeting domain
gggagaaggaaacuagcuaaaggg

SEQ ID NO: 377 - RNA, 18 nt, Artificial Sequence
  Targeting domain
uuuccuucucccaucaua

SEQ ID NO: 378 - RNA, 20 nt, Artificial Sequence
  Targeting domain
aguuuccuucucccaucaua

SEQ ID NO: 379 - RNA, 21 nt, Artificial Sequence
  Targeting domain
uaguuuccuucucccaucaua

SEQ ID NO: 380 - RNA, 22 nt, Artificial Sequence
  Targeting domain
cuaguuuccuucucccaucaua

SEQ ID NO: 381 - RNA, 24 nt, Artificial Sequence
  Targeting domain
agcuaguuuccuucucccaucaua

SEQ ID NO: 382 - RNA, 18 nt, Artificial Sequence
  Targeting domain
agagaaaaacuggaauga

SEQ ID NO: 383 - RNA, 19 nt, Artificial Sequence
  Targeting domain
uagagaaaaacuggaauga

SEQ ID NO: 384 - RNA, 20 nt, Artificial Sequence
  Targeting domain
uuagagaaaaacuggaauga

SEQ ID NO: 385 - RNA, 21 nt, Artificial Sequence
  Targeting domain
auuagagaaaaacuggaauga

SEQ ID NO: 386 - RNA, 22 nt, Artificial Sequence
  Targeting domain
aauuagagaaaaacuggaauga

SEQ ID NO: 387 - RNA, 23 nt, Artificial Sequence
  Targeting domain
aaauuagagaaaaacuggaauga

SEQ ID NO: 388 - RNA, 24 nt, Artificial Sequence
  Targeting domain
uaaauuagagaaaaacuggaauga

SEQ ID NO: 389 - RNA, 18 nt, Artificial Sequence
  Targeting domain
aauaaauuagagaaaaac

SEQ ID NO: 390 - RNA, 21 nt, Artificial Sequence
  Targeting domain
aagaauaaauuagagaaaaac

SEQ ID NO: 391 - RNA, 18 nt, Artificial Sequence
  Targeting domain
aggaaacuagcuaaaggg

SEQ ID NO: 392 - RNA, 19 nt, Artificial Sequence
  Targeting domain
aaggaaacuagcuaaaggg

SEQ ID NO: 393 - RNA, 21 nt, Artificial Sequence
  Targeting domain
agaaggaaacuagcuaaaggg

SEQ ID NO: 394 - RNA, 18 nt, Artificial Sequence
  Targeting domain
uggggaaggggcccccaa

SEQ ID NO: 395 - RNA, 19 nt, Artificial Sequence
  Targeting domain
guggggaaggggcccccaa

SEQ ID NO: 396 - RNA, 20 nt, Artificial Sequence
  Targeting domain
uguggggaaggggcccccaa

SEQ ID NO: 397 - RNA, 21 nt, Artificial Sequence
  Targeting domain
guguggggaaggggcccccaa

SEQ ID NO: 398 - RNA, 22 nt, Artificial Sequence
  Targeting domain
aguguggggaaggggcccccaa

SEQ ID NO: 399 - RNA, 23 nt, Artificial Sequence
  Targeting domain
uaguguggggaaggggcccccaa

SEQ ID NO: 400 - RNA, 24 nt, Artificial Sequence
  Targeting domain
auaguguggggaaggggcccccaa

SEQ ID NO: 401 - RNA, 18 nt, Artificial Sequence
  Targeting domain
accucagacguuccagaa

SEQ ID NO: 402 - RNA, 19 nt, Artificial Sequence
  Targeting domain
aaccucagacguuccagaa

SEQ ID NO: 403 - RNA, 20 nt, Artificial Sequence
  Targeting domain
uaaccucagacguuccagaa

SEQ ID NO: 404 - RNA, 21 nt, Artificial Sequence
  Targeting domain
auaaccucagacguuccagaa

SEQ ID NO: 405 - RNA, 22 nt, Artificial Sequence
  Targeting domain
gauaaccucagacguuccagaa

SEQ ID NO: 406 - RNA, 23 nt, Artificial Sequence
  Targeting domain
ugauaaccucagacguuccagaa

SEQ ID NO: 407 - RNA, 24 nt, Artificial Sequence
  Targeting domain
uugauaaccucagacguuccagaa

SEQ ID NO: 408 - RNA, 18 nt, Artificial Sequence
  Targeting domain
cgccggccccuggccuca

SEQ ID NO: 409 - RNA, 19 nt, Artificial Sequence
  Targeting domain
ccgccggccccuggccuca

SEQ ID NO: 410 - RNA, 20 nt, Artificial Sequence
  Targeting domain
gccgccggccccuggccuca

SEQ ID NO: 411 - RNA, 21 nt, Artificial Sequence
  Targeting domain
agccgccggccccuggccuca

SEQ ID NO: 412 - RNA, 22 nt, Artificial Sequence
  Targeting domain
cagccgccggccccuggccuca

SEQ ID NO: 413 - RNA, 23 nt, Artificial Sequence
  Targeting domain
ccagccgccggccccuggccuca

SEQ ID NO: 414 - RNA, 24 nt, Artificial Sequence
  Targeting domain
gccagccgccggccccuggccuca

SEQ ID NO: 415 - RNA, 18 nt, Artificial Sequence
  Targeting domain
ggcaaggcuggccaaccc

SEQ ID NO: 416 - RNA, 19 nt, Artificial Sequence
  Targeting domain
aggcaaggcuggccaaccc

SEQ ID NO: 417 - RNA, 20 nt, Artificial Sequence
  Targeting domain
aaggcaaggcuggccaaccc

SEQ ID NO: 418 - RNA, 21 nt, Artificial Sequence
  Targeting domain
caaggcaaggcuggccaaccc

SEQ ID NO: 419 - RNA, 22 nt, Artificial Sequence
  Targeting domain
ucaaggcaaggcuggccaaccc

SEQ ID NO: 420 - RNA, 23 nt, Artificial Sequence
  Targeting domain
gucaaggcaaggcuggccaaccc

SEQ ID NO: 421 - RNA, 24 nt, Artificial Sequence
  Targeting domain
ggucaaggcaaggcuggccaaccc

SEQ ID NO: 422 - RNA, 18 nt, Artificial Sequence
  Targeting domain
ggcuggccaacccauggg

SEQ ID NO: 423 - RNA, 19 nt, Artificial Sequence
  Targeting domain
aggcuggccaacccauggg

SEQ ID NO: 424 - RNA, 21 nt, Artificial Sequence
  Targeting domain
caaggcuggccaacccauggg

SEQ ID NO: 425 - RNA, 22 nt, Artificial Sequence
  Targeting domain
gcaaggcuggccaacccauggg

SEQ ID NO: 426 - RNA, 23 nt, Artificial Sequence
  Targeting domain
ggcaaggcuggccaacccauggg

SEQ ID NO: 427 - RNA, 24 nt, Artificial Sequence
  Targeting domain
aggcaaggcuggccaacccauggg

SEQ ID NO: 428 - RNA, 18 nt, Artificial Sequence
  Targeting domain
gaguguguggaacugcug

SEQ ID NO: 429 - RNA, 19 nt, Artificial Sequence
  Targeting domain
cgaguguguggaacugcug

SEQ ID NO: 430 - RNA, 20 nt, Artificial Sequence
  Targeting domain
gcgaguguguggaacugcug

SEQ ID NO: 431 - RNA, 21 nt, Artificial Sequence
  Targeting domain
agcgaguguguggaacugcug

SEQ ID NO: 432 - RNA, 22 nt, Artificial Sequence
  Targeting domain
aagcgaguguguggaacugcug

SEQ ID NO: 433 - RNA, 23 nt, Artificial Sequence
  Targeting domain
gaagcgaguguguggaacugcug

SEQ ID NO: 434 - RNA, 24 nt, Artificial Sequence
  Targeting domain
agaagcgaguguguggaacugcug

SEQ ID NO: 435 - RNA, 18 nt, Artificial Sequence
  Targeting domain
ccuggcuaaacuccaccc

SEQ ID NO: 436 - RNA, 19 nt, Artificial Sequence
  Targeting domain
cccuggcuaaacuccaccc

SEQ ID NO: 437 - RNA, 20 nt, Artificial Sequence
  Targeting domain
ucccuggcuaaacuccaccc

SEQ ID NO: 438 - RNA, 21 nt, Artificial Sequence
  Targeting domain
gucccuggcuaaacuccaccc

SEQ ID NO: 439 - RNA, 22 nt, Artificial Sequence
  Targeting domain
ggucccuggcuaaacuccaccc

SEQ ID NO: 440 - RNA, 23 nt, Artificial Sequence
  Targeting domain
cggucccuggcuaaacuccaccc

SEQ ID NO: 441 - RNA, 24 nt, Artificial Sequence
  Targeting domain
acggucccuggcuaaacuccaccc

SEQ ID NO: 442 - RNA, 18 nt, Artificial Sequence
  Targeting domain
ggcggcuggcuagggaug

SEQ ID NO: 443 - RNA, 19 nt, Artificial Sequence
  Targeting domain
cggcggcuggcuagggaug

SEQ ID NO: 444 - RNA, 20 nt, Artificial Sequence
  Targeting domain
ccggcggcuggcuagggaug

SEQ ID NO: 445 - RNA, 21 nt, Artificial Sequence
  Targeting domain
gccggcggcuggcuagggaug

SEQ ID NO: 446 - RNA, 22 nt, Artificial Sequence
  Targeting domain
ggccggcggcuggcuagggaug

SEQ ID NO: 447 - RNA, 23 nt, Artificial Sequence
  Targeting domain
gggccggcggcuggcuagggaug

SEQ ID NO: 448 - RNA, 24 nt, Artificial Sequence
  Targeting domain
ggggccggcggcuggcuagggaug

SEQ ID NO: 449 - RNA, 18 nt, Artificial Sequence
  Targeting domain
aggggccggcggcuggcu

SEQ ID NO: 450 - RNA, 19 nt, Artificial Sequence
  Targeting domain
caggggccggcggcuggcu

SEQ ID NO: 451 - RNA, 21 nt, Artificial Sequence
  Targeting domain
gccaggggccggcggcuggcu

SEQ ID NO: 452 - RNA, 22 nt, Artificial Sequence
  Targeting domain
ggccaggggccggcggcuggcu

SEQ ID NO: 453 - RNA, 23 nt, Artificial Sequence
  Targeting domain
aggccaggggccggcggcuggcu

SEQ ID NO: 454 - RNA, 24 nt, Artificial Sequence
  Targeting domain
gaggccaggggccggcggcuggcu

SEQ ID NO: 455 - RNA, 18 nt, Artificial Sequence
  Targeting domain
aaacuugaccaauagucu

SEQ ID NO: 456 - RNA, 19 nt, Artificial Sequence
  Targeting domain
caaacuugaccaauagucu

SEQ ID NO: 457 - RNA, 20 nt, Artificial Sequence
  Targeting domain
gcaaacuugaccaauagucu

SEQ ID NO: 458 - RNA, 21 nt, Artificial Sequence
  Targeting domain
ggcaaacuugaccaauagucu

SEQ ID NO: 459 - RNA, 22 nt, Artificial Sequence
  Targeting domain
aggcaaacuugaccaauagucu

SEQ ID NO: 460 - RNA, 23 nt, Artificial Sequence
  Targeting domain
aaggcaaacuugaccaauagucu

SEQ ID NO: 461 - RNA, 24 nt, Artificial Sequence
  Targeting domain
caaggcaaacuugaccaauagucu

SEQ ID NO: 462 - RNA, 18 nt, Artificial Sequence
  Targeting domain
uucagacagauauuugca

SEQ ID NO: 463 - RNA, 19 nt, Artificial Sequence
  Targeting domain
uuucagacagauauuugca

SEQ ID NO: 464 - RNA, 20 nt, Artificial Sequence
  Targeting domain
guuucagacagauauuugca

SEQ ID NO: 465 - RNA, 21 nt, Artificial Sequence
  Targeting domain
cguuucagacagauauuugca

SEQ ID NO: 466 - RNA, 22 nt, Artificial Sequence
  Targeting domain
ccguuucagacagauauuugca

SEQ ID NO: 467 - RNA, 23 nt, Artificial Sequence
  Targeting domain
accguuucagacagauauuugca

SEQ ID NO: 468 - RNA, 24 nt, Artificial Sequence
  Targeting domain
gaccguuucagacagauauuugca

SEQ ID NO: 469 - RNA, 18 nt, Artificial Sequence
  Targeting domain
aguuuccuucucccauca

SEQ ID NO: 470 - RNA, 19 nt, Artificial Sequence
  Targeting domain
uaguuuccuucucccauca

SEQ ID NO: 471 - RNA, 20 nt, Artificial Sequence
  Targeting domain
cuaguuuccuucucccauca

SEQ ID NO: 472 - RNA, 21 nt, Artificial Sequence
  Targeting domain
gcuaguuuccuucucccauca

SEQ ID NO: 473 - RNA, 22 nt, Artificial Sequence
  Targeting domain
agcuaguuuccuucucccauca

SEQ ID NO: 474 - RNA, 23 nt, Artificial Sequence
  Targeting domain
uagcuaguuuccuucucccauca

SEQ ID NO: 475 - RNA, 24 nt, Artificial Sequence
  Targeting domain
uuagcuaguuuccuucucccauca

SEQ ID NO: 476 - RNA, 18 nt, Artificial Sequence
  Targeting domain
auugagauagugugggga

SEQ ID NO: 477 - RNA, 19 nt, Artificial Sequence
  Targeting domain
cauugagauagugugggga

SEQ ID NO: 478 - RNA, 21 nt, Artificial Sequence
  Targeting domain
ugcauugagauagugugggga

SEQ ID NO: 479 - RNA, 22 nt, Artificial Sequence
  Targeting domain
uugcauugagauagugugggga

SEQ ID NO: 480 - RNA, 23 nt, Artificial Sequence
  Targeting domain
uuugcauugagauagugugggga

SEQ ID NO: 481 - RNA, 24 nt, Artificial Sequence
  Targeting domain
auuugcauugagauagugugggga

SEQ ID NO: 482 - RNA, 18 nt, Artificial Sequence
  Targeting domain
ucccaucauagaggauac

SEQ ID NO: 483 - RNA, 19 nt, Artificial Sequence
  Targeting domain
cucccaucauagaggauac

SEQ ID NO: 484 - RNA, 20 nt, Artificial Sequence
  Targeting domain
ucucccaucauagaggauac

SEQ ID NO: 485 - RNA, 21 nt, Artificial Sequence
  Targeting domain
uucucccaucauagaggauac

SEQ ID NO: 486 - RNA, 22 nt, Artificial Sequence
  Targeting domain
cuucucccaucauagaggauac

SEQ ID NO: 487 - RNA, 23 nt, Artificial Sequence
  Targeting domain
ccuucucccaucauagaggauac

SEQ ID NO: 488 - RNA, 24 nt, Artificial Sequence
  Targeting domain
uccuucucccaucauagaggauac

SEQ ID NO: 489 - RNA, 18 nt, Artificial Sequence
  Targeting domain
uguggggaaggggccccc

SEQ ID NO: 490 - RNA, 19 nt, Artificial Sequence
  Targeting domain
guguggggaaggggccccc

SEQ ID NO: 491 - RNA, 20 nt, Artificial Sequence
  Targeting domain
aguguggggaaggggccccc

SEQ ID NO: 492 - RNA, 21 nt, Artificial Sequence
  Targeting domain
uaguguggggaaggggccccc

SEQ ID NO: 493 - RNA, 22 nt, Artificial Sequence
  Targeting domain
auaguguggggaaggggccccc

SEQ ID NO: 494 - RNA, 23 nt, Artificial Sequence
  Targeting domain
gauaguguggggaaggggccccc

SEQ ID NO: 495 - RNA, 24 nt, Artificial Sequence
  Targeting domain
agauaguguggggaaggggccccc

SEQ ID NO: 496 - RNA, 18 nt, Artificial Sequence
  Targeting domain
cauggguggaguuuagcc

SEQ ID NO: 497 - RNA, 19 nt, Artificial Sequence
  Targeting domain
ccauggguggaguuuagcc

SEQ ID NO: 498 - RNA, 21 nt, Artificial Sequence
  Targeting domain
acccauggguggaguuuagcc

SEQ ID NO: 499 - RNA, 22 nt, Artificial Sequence
  Targeting domain
aacccauggguggaguuuagcc

SEQ ID NO: 500 - RNA, 23 nt, Artificial Sequence
  Targeting domain
caacccauggguggaguuuagcc

SEQ ID NO: 501 - RNA, 24 nt, Artificial Sequence
  Targeting domain
ccaacccauggguggaguuuagcc

SEQ ID NO: 502 - RNA, 18 nt, Artificial Sequence
  Targeting domain
ccauggguggaguuuagc

SEQ ID NO: 503 - RNA, 19 nt, Artificial Sequence
  Targeting domain
cccauggguggaguuuagc

SEQ ID NO: 504 - RNA, 20 nt, Artificial Sequence
  Targeting domain
acccauggguggaguuuagc

SEQ ID NO: 505 - RNA, 21 nt, Artificial Sequence
  Targeting domain
aacccauggguggaguuuagc

SEQ ID NO: 506 - RNA, 22 nt, Artificial Sequence
  Targeting domain
caacccauggguggaguuuagc

SEQ ID NO: 507 - RNA, 23 nt, Artificial Sequence
  Targeting domain
ccaacccauggguggaguuuagc

SEQ ID NO: 508 - RNA, 24 nt, Artificial Sequence
  Targeting domain
gccaacccauggguggaguuuagc

SEQ ID NO: 509 - RNA, 18 nt, Artificial Sequence
  Targeting domain
ugauaaccucagacguuc

SEQ ID NO: 510 - RNA, 19 nt, Artificial Sequence
  Targeting domain
uugauaaccucagacguuc

SEQ ID NO: 511 - RNA, 20 nt, Artificial Sequence
  Targeting domain
auugauaaccucagacguuc

SEQ ID NO: 512 - RNA, 21 nt, Artificial Sequence
  Targeting domain
uauugauaaccucagacguuc

SEQ ID NO: 513 - RNA, 22 nt, Artificial Sequence
  Targeting domain
uuauugauaaccucagacguuc

SEQ ID NO: 514 - RNA, 23 nt, Artificial Sequence
  Targeting domain
cuuauugauaaccucagacguuc

SEQ ID NO: 515 - RNA, 24 nt, Artificial Sequence
  Targeting domain
gcuuauugauaaccucagacguuc

SEQ ID NO: 516 - RNA, 18 nt, Artificial Sequence
  Targeting domain
cauugagauagugugggg

SEQ ID NO: 517 - RNA, 19 nt, Artificial Sequence
  Targeting domain
gcauugagauagugugggg

SEQ ID NO: 518 - RNA, 20 nt, Artificial Sequence
  Targeting domain
ugcauugagauagugugggg

SEQ ID NO: 519 - RNA, 21 nt, Artificial Sequence
  Targeting domain
uugcauugagauagugugggg

SEQ ID NO: 520 - RNA, 22 nt, Artificial Sequence
  Targeting domain
uuugcauugagauagugugggg

SEQ ID NO: 521 - RNA, 23 nt, Artificial Sequence
  Targeting domain
auuugcauugagauagugugggg

SEQ ID NO: 522 - RNA, 24 nt, Artificial Sequence
  Targeting domain
uauuugcauugagauagugugggg

SEQ ID NO: 523 - RNA, 18 nt, Artificial Sequence
  Targeting domain
aggcuggccaacccaugg

SEQ ID NO: 524 - RNA, 19 nt, Artificial Sequence
  Targeting domain
aaggcuggccaacccaugg

SEQ ID NO: 525 - RNA, 20 nt, Artificial Sequence
  Targeting domain
caaggcuggccaacccaugg

SEQ ID NO: 526 - RNA, 21 nt, Artificial Sequence
  Targeting domain
gcaaggcuggccaacccaugg

SEQ ID NO: 527 - RNA, 22 nt, Artificial Sequence
  Targeting domain
ggcaaggcuggccaacccaugg

SEQ ID NO: 528 - RNA, 23 nt, Artificial Sequence
  Targeting domain
aggcaaggcuggccaacccaugg

SEQ ID NO: 529 - RNA, 24 nt, Artificial Sequence
  Targeting domain
aaggcaaggcuggccaacccaugg

SEQ ID NO: 530 - RNA, 18 nt, Artificial Sequence
  Targeting domain
agcgaguguguggaacug

SEQ ID NO: 531 - RNA, 19 nt, Artificial Sequence
  Targeting domain
aagcgaguguguggaacug

SEQ ID NO: 532 - RNA, 20 nt, Artificial Sequence
  Targeting domain
gaagcgaguguguggaacug

SEQ ID NO: 533 - RNA, 21 nt, Artificial Sequence
  Targeting domain
agaagcgaguguguggaacug

SEQ ID NO: 534 - RNA, 22 nt, Artificial Sequence
  Targeting domain
cagaagcgaguguguggaacug

SEQ ID NO: 535 - RNA, 23 nt, Artificial Sequence
  Targeting domain
ccagaagcgaguguguggaacug

SEQ ID NO: 536 - RNA, 24 nt, Artificial Sequence
  Targeting domain
uccagaagcgaguguguggaacug

SEQ ID NO: 537 - RNA, 18 nt, Artificial Sequence
  Targeting domain
auuugcauugagauagug

SEQ ID NO: 538 - RNA, 19 nt, Artificial Sequence
  Targeting domain
uauuugcauugagauagug

SEQ ID NO: 539 - RNA, 21 nt, Artificial Sequence
  Targeting domain
gauauuugcauugagauagug

SEQ ID NO: 540 - RNA, 22 nt, Artificial Sequence
  Targeting domain
agauauuugcauugagauagug

SEQ ID NO: 541 - RNA, 23 nt, Artificial Sequence
  Targeting domain
cagauauuugcauugagauagug

SEQ ID NO: 542 - RNA, 24 nt, Artificial Sequence
  Targeting domain
acagauauuugcauugagauagug

SEQ ID NO: 543 - RNA, 18 nt, Artificial Sequence
  Targeting domain
guuccagaagcgagugug

SEQ ID NO: 544 - RNA, 19 nt, Artificial Sequence
  Targeting domain
cguuccagaagcgagugug

SEQ ID NO: 545 - RNA, 21 nt, Artificial Sequence
  Targeting domain
gacguuccagaagcgagugug

SEQ ID NO: 546 - RNA, 22 nt, Artificial Sequence
  Targeting domain
agacguuccagaagcgagugug

SEQ ID NO: 547 - RNA, 23 nt, Artificial Sequence
  Targeting domain
cagacguuccagaagcgagugug

SEQ ID NO: 548 - RNA, 24 nt, Artificial Sequence
  Targeting domain
ucagacguuccagaagcgagugug

SEQ ID NO: 549 - RNA, 18 nt, Artificial Sequence
  Targeting domain
uugcauugagauagugug

SEQ ID NO: 550 - RNA, 19 nt, Artificial Sequence
  Targeting domain
uuugcauugagauagugug

SEQ ID NO: 551 - RNA, 21 nt, Artificial Sequence
  Targeting domain
uauuugcauugagauagugug

SEQ ID NO: 552 - RNA, 22 nt, Artificial Sequence
  Targeting domain
auauuugcauugagauagugug

SEQ ID NO: 553 - RNA, 23 nt, Artificial Sequence
  Targeting domain
gauauuugcauugagauagugug

SEQ ID NO: 554 - RNA, 24 nt, Artificial Sequence
  Targeting domain
agauauuugcauugagauagugug

SEQ ID NO: 555 - RNA, 18 nt, Artificial Sequence
  Targeting domain
uauuugcauugagauagu

SEQ ID NO: 556 - RNA, 19 nt, Artificial Sequence
  Targeting domain
auauuugcauugagauagu

SEQ ID NO: 557 - RNA, 20 nt, Artificial Sequence
  Targeting domain
gauauuugcauugagauagu

SEQ ID NO: 558 - RNA, 21 nt, Artificial Sequence
  Targeting domain
agauauuugcauugagauagu

SEQ ID NO: 559 - RNA, 22 nt, Artificial Sequence
  Targeting domain
cagauauuugcauugagauagu

SEQ ID NO: 560 - RNA, 23 nt, Artificial Sequence
  Targeting domain
acagauauuugcauugagauagu

SEQ ID NO: 561 - RNA, 24 nt, Artificial Sequence
  Targeting domain
gacagauauuugcauugagauagu

SEQ ID NO: 562 - RNA, 18 nt, Artificial Sequence
  Targeting domain
cguuccagaagcgagugu

SEQ ID NO: 563 - RNA, 19 nt, Artificial Sequence
  Targeting domain
acguuccagaagcgagugu

SEQ ID NO: 564 - RNA, 20 nt, Artificial Sequence
  Targeting domain
gacguuccagaagcgagugu

SEQ ID NO: 565 - RNA, 21 nt, Artificial Sequence
  Targeting domain
agacguuccagaagcgagugu

SEQ ID NO: 566 - RNA, 22 nt, Artificial Sequence
  Targeting domain
cagacguuccagaagcgagugu

SEQ ID NO: 567 - RNA, 23 nt, Artificial Sequence
  Targeting domain
ucagacguuccagaagcgagugu

SEQ ID NO: 568 - RNA, 24 nt, Artificial Sequence
  Targeting domain
cucagacguuccagaagcgagugu

SEQ ID NO: 569 - RNA, 18 nt, Artificial Sequence
  Targeting domain
uuugcauugagauagugu

SEQ ID NO: 570 - RNA, 19 nt, Artificial Sequence
  Targeting domain
auuugcauugagauagugu

SEQ ID NO: 571 - RNA, 21 nt, Artificial Sequence
  Targeting domain
auauuugcauugagauagugu

SEQ ID NO: 572 - RNA, 22 nt, Artificial Sequence
  Targeting domain
gauauuugcauugagauagugu

SEQ ID NO: 573 - RNA, 23 nt, Artificial Sequence
  Targeting domain
agauauuugcauugagauagugu

SEQ ID NO: 574 - RNA, 24 nt, Artificial Sequence
  Targeting domain
cagauauuugcauugagauagugu

SEQ ID NO: 575 - RNA, 18 nt, Artificial Sequence
  Targeting domain
gaauaaauuagagaaaaa

SEQ ID NO: 576 - RNA, 19 nt, Artificial Sequence
  Targeting domain
agaauaaauuagagaaaaa

SEQ ID NO: 577 - RNA, 20 nt, Artificial Sequence
  Targeting domain
aagaauaaauuagagaaaaa

SEQ ID NO: 578 - RNA, 21 nt, Artificial Sequence
  Targeting domain
gaagaauaaauuagagaaaaa

SEQ ID NO: 579 - RNA, 22 nt, Artificial Sequence
  Targeting domain
ggaagaauaaauuagagaaaaa

SEQ ID NO: 580 - RNA, 23 nt, Artificial Sequence
  Targeting domain
gggaagaauaaauuagagaaaaa

SEQ ID NO: 581 - RNA, 24 nt, Artificial Sequence
  Targeting domain
agggaagaauaaauuagagaaaaa

SEQ ID NO: 582 - RNA, 18 nt, Artificial Sequence
  Targeting domain
cuagggaugaagaauaaa

SEQ ID NO: 583 - RNA, 19 nt, Artificial Sequence
  Targeting domain
gcuagggaugaagaauaaa

SEQ ID NO: 584 - RNA, 21 nt, Artificial Sequence
  Targeting domain
uggcuagggaugaagaauaaa

SEQ ID NO: 585 - RNA, 22 nt, Artificial Sequence
  Targeting domain
cuggcuagggaugaagaauaaa

SEQ ID NO: 586 - RNA, 23 nt, Artificial Sequence
  Targeting domain
gcuggcuagggaugaagaauaaa

SEQ ID NO: 587 - RNA, 24 nt, Artificial Sequence
  Targeting domain
ggcuggcuagggaugaagaauaaa

SEQ ID NO: 588 - RNA, 18 nt, Artificial Sequence
  Targeting domain
agaaggaaacuagcuaaa

SEQ ID NO: 589 - RNA, 19 nt, Artificial Sequence
  Targeting domain
gagaaggaaacuagcuaaa

SEQ ID NO: 590 - RNA, 21 nt, Artificial Sequence
  Targeting domain
gggagaaggaaacuagcuaaa

SEQ ID NO: 591 - RNA, 22 nt, Artificial Sequence
  Targeting domain
ugggagaaggaaacuagcuaaa

SEQ ID NO: 592 - RNA, 23 nt, Artificial Sequence
  Targeting domain
augggagaaggaaacuagcuaaa

SEQ ID NO: 593 - RNA, 24 nt, Artificial Sequence
  Targeting domain
gaugggagaaggaaacuagcuaaa

SEQ ID NO: 594 - RNA, 18 nt, Artificial Sequence
  Targeting domain
aaaacuggaaugacugaa

SEQ ID NO: 595 - RNA, 19 nt, Artificial Sequence
  Targeting domain
aaaaacuggaaugacugaa

SEQ ID NO: 596 - RNA, 20 nt, Artificial Sequence
  Targeting domain
gaaaaacuggaaugacugaa

SEQ ID NO: 597 - RNA, 21 nt, Artificial Sequence
  Targeting domain
agaaaaacuggaaugacugaa

SEQ ID NO: 598 - RNA, 22 nt, Artificial Sequence
  Targeting domain
gagaaaaacuggaaugacugaa

SEQ ID NO: 599 - RNA, 23 nt, Artificial Sequence
  Targeting domain
agagaaaaacuggaaugacugaa

SEQ ID NO: 600 - RNA, 24 nt, Artificial Sequence
  Targeting domain
uagagaaaaacuggaaugacugaa

SEQ ID NO: 601 - RNA, 18 nt, Artificial Sequence
  Targeting domain
gcuagggaugaagaauaa

SEQ ID NO: 602 - RNA, 19 nt, Artificial Sequence
  Targeting domain
ggcuagggaugaagaauaa

SEQ ID NO: 603 - RNA, 20 nt, Artificial Sequence
  Targeting domain
uggcuagggaugaagaauaa

SEQ ID NO: 604 - RNA, 21 nt, Artificial Sequence
  Targeting domain
cuggcuagggaugaagaauaa

SEQ ID NO: 605 - RNA, 22 nt, Artificial Sequence
  Targeting domain
gcuggcuagggaugaagaauaa

SEQ ID NO: 606 - RNA, 23 nt, Artificial Sequence
  Targeting domain
ggcuggcuagggaugaagaauaa

SEQ ID NO: 607 - RNA, 24 nt, Artificial Sequence
  Targeting domain
cggcuggcuagggaugaagaauaa

SEQ ID NO: 608 - RNA, 18 nt, Artificial Sequence
  Targeting domain
gagaaggaaacuagcuaa

SEQ ID NO: 609 - RNA, 19 nt, Artificial Sequence
  Targeting domain
ggagaaggaaacuagcuaa

SEQ ID NO: 610 - RNA, 21 nt, Artificial Sequence
  Targeting domain
ugggagaaggaaacuagcuaa

SEQ ID NO: 611 - RNA, 22 nt, Artificial Sequence
  Targeting domain
augggagaaggaaacuagcuaa

SEQ ID NO: 612 - RNA, 23 nt, Artificial Sequence
  Targeting domain
gaugggagaaggaaacuagcuaa

SEQ ID NO: 613 - RNA, 24 nt, Artificial Sequence
  Targeting domain
ugaugggagaaggaaacuagcuaa

SEQ ID NO: 614 - RNA, 18 nt, Artificial Sequence
  Targeting domain
auagucuuagaguaucca

SEQ ID NO: 615 - RNA, 19 nt, Artificial Sequence
  Targeting domain
aauagucuuagaguaucca

SEQ ID NO: 616 - RNA, 20 nt, Artificial Sequence
  Targeting domain
caauagucuuagaguaucca

SEQ ID NO: 617 - RNA, 21 nt, Artificial Sequence
  Targeting domain
ccaauagucuuagaguaucca

SEQ ID NO: 618 - RNA, 22 nt, Artificial Sequence
  Targeting domain
accaauagucuuagaguaucca

SEQ ID NO: 619 - RNA, 23 nt, Artificial Sequence
  Targeting domain
gaccaauagucuuagaguaucca

SEQ ID NO: 620 - RNA, 24 nt, Artificial Sequence
  Targeting domain
ugaccaauagucuuagaguaucca

SEQ ID NO: 621 - RNA, 18 nt, Artificial Sequence
  Targeting domain
auccucuaugaugggaga

SEQ ID NO: 622 - RNA, 19 nt, Artificial Sequence
  Targeting domain
uauccucuaugaugggaga

SEQ ID NO: 623 - RNA, 21 nt, Artificial Sequence
  Targeting domain
gguauccucuaugaugggaga

SEQ ID NO: 624 - RNA, 22 nt, Artificial Sequence
  Targeting domain
ugguauccucuaugaugggaga

SEQ ID NO: 625 - RNA, 23 nt, Artificial Sequence
  Targeting domain
cugguauccucuaugaugggaga

SEQ ID NO: 626 - RNA, 24 nt, Artificial Sequence
  Targeting domain
ccugguauccucuaugaugggaga

SEQ ID NO: 627 - RNA, 18 nt, Artificial Sequence
  Targeting domain
uccugguauccucuauga

SEQ ID NO: 628 - RNA, 19 nt, Artificial Sequence
  Targeting domain
guccugguauccucuauga

SEQ ID NO: 629 - RNA, 21 nt, Artificial Sequence
  Targeting domain
aaguccugguauccucuauga

SEQ ID NO: 630 - RNA, 22 nt, Artificial Sequence
  Targeting domain
gaaguccugguauccucuauga

SEQ ID NO: 631 - RNA, 23 nt, Artificial Sequence
  Targeting domain
agaaguccugguauccucuauga

SEQ ID NO: 632 - RNA, 24 nt, Artificial Sequence
  Targeting domain
aagaaguccugguauccucuauga

SEQ ID NO: 633 - RNA, 18 nt, Artificial Sequence
  Targeting domain
ggagaaggaaacuagcua

SEQ ID NO: 634 - RNA, 19 nt, Artificial Sequence
  Targeting domain
gggagaaggaaacuagcua

SEQ ID NO: 635 - RNA, 20 nt, Artificial Sequence
  Targeting domain
ugggagaaggaaacuagcua

SEQ ID NO: 636 - RNA, 21 nt, Artificial Sequence
  Targeting domain
augggagaaggaaacuagcua

SEQ ID NO: 637 - RNA, 22 nt, Artificial Sequence
  Targeting domain
gaugggagaaggaaacuagcua

SEQ ID NO: 638 - RNA, 23 nt, Artificial Sequence
  Targeting domain
ugaugggagaaggaaacuagcua

SEQ ID NO: 639 - RNA, 24 nt, Artificial Sequence
  Targeting domain
augaugggagaaggaaacuagcua

SEQ ID NO: 640 - RNA, 18 nt, Artificial Sequence
  Targeting domain
aaagggaagaauaaauua

SEQ ID NO: 641 - RNA, 19 nt, Artificial Sequence
  Targeting domain
uaaagggaagaauaaauua

SEQ ID NO: 642 - RNA, 20 nt, Artificial Sequence
  Targeting domain
cuaaagggaagaauaaauua

SEQ ID NO: 643 - RNA, 21 nt, Artificial Sequence
  Targeting domain
gcuaaagggaagaauaaauua

SEQ ID NO: 644 - RNA, 22 nt, Artificial Sequence
  Targeting domain
agcuaaagggaagaauaaauua

SEQ ID NO: 645 - RNA, 23 nt, Artificial Sequence
  Targeting domain
uagcuaaagggaagaauaaauua

SEQ ID NO: 646 - RNA, 24 nt, Artificial Sequence
  Targeting domain
cuagcuaaagggaagaauaaauua

SEQ ID NO: 647 - RNA, 18 nt, Artificial Sequence
  Targeting domain
agaguauccagugaggcc

SEQ ID NO: 648 - RNA, 19 nt, Artificial Sequence
  Targeting domain
uagaguauccagugaggcc

SEQ ID NO: 649 - RNA, 21 nt, Artificial Sequence
  Targeting domain
cuuagaguauccagugaggcc

SEQ ID NO: 650 - RNA, 22 nt, Artificial Sequence
  Targeting domain
ucuuagaguauccagugaggcc

SEQ ID NO: 651 - RNA, 23 nt, Artificial Sequence
  Targeting domain
gucuuagaguauccagugaggcc

SEQ ID NO: 652 - RNA, 24 nt, Artificial Sequence
  Targeting domain
agucuuagaguauccagugaggcc

SEQ ID NO: 653 - RNA, 18 nt, Artificial Sequence
  Targeting domain
uagaguauccagugaggc

SEQ ID NO: 654 - RNA, 19 nt, Artificial Sequence
  Targeting domain
uuagaguauccagugaggc

SEQ ID NO: 655 - RNA, 20 nt, Artificial Sequence
  Targeting domain
cuuagaguauccagugaggc

SEQ ID NO: 656 - RNA, 21 nt, Artificial Sequence
  Targeting domain
ucuuagaguauccagugaggc

SEQ ID NO: 657 - RNA, 22 nt, Artificial Sequence
  Targeting domain
gucuuagaguauccagugaggc

SEQ ID NO: 658 - RNA, 23 nt, Artificial Sequence
  Targeting domain
agucuuagaguauccagugaggc

SEQ ID NO: 659 - RNA, 24 nt, Artificial Sequence
  Targeting domain
uagucuuagaguauccagugaggc

SEQ ID NO: 660 - RNA, 18 nt, Artificial Sequence
  Targeting domain
caggggccggcggcuggc

SEQ ID NO: 661 - RNA, 19 nt, Artificial Sequence
  Targeting domain
ccaggggccggcggcuggc

SEQ ID NO: 662 - RNA, 20 nt, Artificial Sequence
  Targeting domain
gccaggggccggcggcuggc

SEQ ID NO: 663 - RNA, 21 nt, Artificial Sequence
  Targeting domain
ggccaggggccggcggcuggc

SEQ ID NO: 664 - RNA, 22 nt, Artificial Sequence
  Targeting domain
aggccaggggccggcggcuggc

SEQ ID NO: 665 - RNA, 23 nt, Artificial Sequence
  Targeting domain
gaggccaggggccggcggcuggc

SEQ ID NO: 666 - RNA, 24 nt, Artificial Sequence
  Targeting domain
ugaggccaggggccggcggcuggc

SEQ ID NO: 667 - RNA, 18 nt, Artificial Sequence
  Targeting domain
aaaauuagcaguauccuc

SEQ ID NO: 668 - RNA, 19 nt, Artificial Sequence
  Targeting domain
aaaaauuagcaguauccuc

SEQ ID NO: 669 - RNA, 20 nt, Artificial Sequence
  Targeting domain
aaaaaauuagcaguauccuc

SEQ ID NO: 670 - RNA, 21 nt, Artificial Sequence
  Targeting domain
aaaaaaauuagcaguauccuc

SEQ ID NO: 671 - RNA, 22 nt, Artificial Sequence
  Targeting domain
aaaaaaaauuagcaguauccuc

SEQ ID NO: 672 - RNA, 23 nt, Artificial Sequence
  Targeting domain
uaaaaaaaauuagcaguauccuc

SEQ ID NO: 673 - RNA, 24 nt, Artificial Sequence
  Targeting domain
auaaaaaaaauuagcaguauccuc

SEQ ID NO: 674 - RNA, 18 nt, Artificial Sequence
  Targeting domain
guuccacacacucgcuuc

SEQ ID NO: 675 - RNA, 19 nt, Artificial Sequence
  Targeting domain
aguuccacacacucgcuuc

SEQ ID NO: 676 - RNA, 21 nt, Artificial Sequence
  Targeting domain
gcaguuccacacacucgcuuc

SEQ ID NO: 677 - RNA, 22 nt, Artificial Sequence
  Targeting domain
agcaguuccacacacucgcuuc

SEQ ID NO: 678 - RNA, 23 nt, Artificial Sequence
  Targeting domain
cagcaguuccacacacucgcuuc

SEQ ID NO: 679 - RNA, 24 nt, Artificial Sequence
  Targeting domain
ucagcaguuccacacacucgcuuc

SEQ ID NO: 680 - RNA, 18 nt, Artificial Sequence
  Targeting domain
uauccucuaugaugggag

SEQ ID NO: 681 - RNA, 19 nt, Artificial Sequence
  Targeting domain
guauccucuaugaugggag

SEQ ID NO: 682 - RNA, 20 nt, Artificial Sequence
  Targeting domain
gguauccucuaugaugggag

SEQ ID NO: 683 - RNA, 21 nt, Artificial Sequence
  Targeting domain
ugguauccucuaugaugggag

SEQ ID NO: 684 - RNA, 22 nt, Artificial Sequence
  Targeting domain
cugguauccucuaugaugggag

SEQ ID NO: 685 - RNA, 23 nt, Artificial Sequence
  Targeting domain
ccugguauccucuaugaugggag

SEQ ID NO: 686 - RNA, 24 nt, Artificial Sequence
  Targeting domain
uccugguauccucuaugaugggag

SEQ ID NO: 687 - RNA, 18 nt, Artificial Sequence
  Targeting domain
gccggcggcuggcuaggg

SEQ ID NO: 688 - RNA, 19 nt, Artificial Sequence
  Targeting domain
ggccggcggcuggcuaggg

SEQ ID NO: 689 - RNA, 20 nt, Artificial Sequence
  Targeting domain
gggccggcggcuggcuaggg

SEQ ID NO: 690 - RNA, 21 nt, Artificial Sequence
  Targeting domain
ggggccggcggcuggcuaggg

SEQ ID NO: 691 - RNA, 22 nt, Artificial Sequence
  Targeting domain
aggggccggcggcuggcuaggg

SEQ ID NO: 692 - RNA, 23 nt, Artificial Sequence
  Targeting domain
caggggccggcggcuggcuaggg

SEQ ID NO: 693 - RNA, 24 nt, Artificial Sequence
  Targeting domain
ccaggggccggcggcuggcuaggg

SEQ ID NO: 694 - RNA, 18 nt, Artificial Sequence
  Targeting domain
ugguauccucuaugaugg

SEQ ID NO: 695 - RNA, 19 nt, Artificial Sequence
  Targeting domain
cugguauccucuaugaugg

SEQ ID NO: 696 - RNA, 20 nt, Artificial Sequence
  Targeting domain
ccugguauccucuaugaugg

SEQ ID NO: 697 - RNA, 21 nt, Artificial Sequence
  Targeting domain
uccugguauccucuaugaugg

SEQ ID NO: 698 - RNA, 22 nt, Artificial Sequence
  Targeting domain
guccugguauccucuaugaugg

SEQ ID NO: 699 - RNA, 23 nt, Artificial Sequence
  Targeting domain
aguccugguauccucuaugaugg

SEQ ID NO: 700 - RNA, 24 nt, Artificial Sequence
  Targeting domain
aaguccugguauccucuaugaugg

SEQ ID NO: 701 - RNA, 18 nt, Artificial Sequence
  Targeting domain
guccugguauccucuaug

SEQ ID NO: 702 - RNA, 19 nt, Artificial Sequence
  Targeting domain
aguccugguauccucuaug

SEQ ID NO: 703 - RNA, 20 nt, Artificial Sequence
  Targeting domain
aaguccugguauccucuaug

SEQ ID NO: 704 - RNA, 21 nt, Artificial Sequence
  Targeting domain
gaaguccugguauccucuaug

SEQ ID NO: 705 - RNA, 22 nt, Artificial Sequence
  Targeting domain
agaaguccugguauccucuaug

SEQ ID NO: 706 - RNA, 23 nt, Artificial Sequence
  Targeting domain
aagaaguccugguauccucuaug

SEQ ID NO: 707 - RNA, 24 nt, Artificial Sequence
  Targeting domain
aaagaaguccugguauccucuaug

SEQ ID NO: 708 - RNA, 18 nt, Artificial Sequence
  Targeting domain
cuaaagggaagaauaaau

SEQ ID NO: 709 - RNA, 19 nt, Artificial Sequence
  Targeting domain
gcuaaagggaagaauaaau

SEQ ID NO: 710 - RNA, 20 nt, Artificial Sequence
  Targeting domain
agcuaaagggaagaauaaau

SEQ ID NO: 711 - RNA, 21 nt, Artificial Sequence
  Targeting domain
uagcuaaagggaagaauaaau

SEQ ID NO: 712 - RNA, 22 nt, Artificial Sequence
  Targeting domain
cuagcuaaagggaagaauaaau

SEQ ID NO: 713 - RNA, 23 nt, Artificial Sequence
  Targeting domain
acuagcuaaagggaagaauaaau

SEQ ID NO: 714 - RNA, 24 nt, Artificial Sequence
  Targeting domain
aacuagcuaaagggaagaauaaau

SEQ ID NO: 715 - RNA, 18 nt, Artificial Sequence
  Targeting domain
aaacuggaaugacugaau

SEQ ID NO: 716 - RNA, 19 nt, Artificial Sequence
  Targeting domain
aaaacuggaaugacugaau

SEQ ID NO: 717 - RNA, 21 nt, Artificial Sequence
  Targeting domain
gaaaaacuggaaugacugaau

SEQ ID NO: 718 - RNA, 22 nt, Artificial Sequence
  Targeting domain
agaaaaacuggaaugacugaau

SEQ ID NO: 719 - RNA, 23 nt, Artificial Sequence
  Targeting domain
gagaaaaacuggaaugacugaau

SEQ ID NO: 720 - RNA, 24 nt, Artificial Sequence
  Targeting domain
agagaaaaacuggaaugacugaau

SEQ ID NO: 721 - RNA, 18 nt, Artificial Sequence
  Targeting domain
ccugguauccucuaugau

SEQ ID NO: 722 - RNA, 19 nt, Artificial Sequence
  Targeting domain
uccugguauccucuaugau

SEQ ID NO: 723 - RNA, 21 nt, Artificial Sequence
  Targeting domain
aguccugguauccucuaugau

SEQ ID NO: 724 - RNA, 22 nt, Artificial Sequence
  Targeting domain
aaguccugguauccucuaugau

SEQ ID NO: 725 - RNA, 23 nt, Artificial Sequence
  Targeting domain
gaaguccugguauccucuaugau

SEQ ID NO: 726 - RNA, 24 nt, Artificial Sequence
  Targeting domain
agaaguccugguauccucuaugau

SEQ ID NO: 727 - RNA, 18 nt, Artificial Sequence
  Targeting domain
aaauuagcaguauccucu

SEQ ID NO: 728 - RNA, 19 nt, Artificial Sequence
  Targeting domain
aaaauuagcaguauccucu

SEQ ID NO: 729 - RNA, 21 nt, Artificial Sequence
  Targeting domain
aaaaaauuagcaguauccucu

SEQ ID NO: 730 - RNA, 22 nt, Artificial Sequence
  Targeting domain
aaaaaaauuagcaguauccucu

SEQ ID NO: 731 - RNA, 23 nt, Artificial Sequence
  Targeting domain
aaaaaaaauuagcaguauccucu

SEQ ID NO: 732 - RNA, 24 nt, Artificial Sequence
  Targeting domain
uaaaaaaaauuagcaguauccucu

SEQ ID NO: 733 - RNA, 18 nt, Artificial Sequence
  Targeting domain
cacucgcuucuggaacgu

SEQ ID NO: 734 - RNA, 19 nt, Artificial Sequence
  Targeting domain
acacucgcuucuggaacgu

SEQ ID NO: 735 - RNA, 20 nt, Artificial Sequence
  Targeting domain
cacacucgcuucuggaacgu

SEQ ID NO: 736 - RNA, 21 nt, Artificial Sequence
  Targeting domain
acacacucgcuucuggaacgu

SEQ ID NO: 737 - RNA, 22 nt, Artificial Sequence
  Targeting domain
cacacacucgcuucuggaacgu

SEQ ID NO: 738 - RNA, 23 nt, Artificial Sequence
  Targeting domain
ccacacacucgcuucuggaacgu

SEQ ID NO: 739 - RNA, 24 nt, Artificial Sequence
  Targeting domain
uccacacacucgcuucuggaacgu

SEQ ID NO: 740 - RNA, 18 nt, Artificial Sequence
  Targeting domain
cucaaugcaaauaucugu

SEQ ID NO: 741 - RNA, 19 nt, Artificial Sequence
  Targeting domain
ucucaaugcaaauaucugu

SEQ ID NO: 742 - RNA, 20 nt, Artificial Sequence
  Targeting domain
aucucaaugcaaauaucugu

SEQ ID NO: 743 - RNA, 21 nt, Artificial Sequence
  Targeting domain
uaucucaaugcaaauaucugu

SEQ ID NO: 744 - RNA, 22 nt, Artificial Sequence
  Targeting domain
cuaucucaaugcaaauaucugu

SEQ ID NO: 745 - RNA, 23 nt, Artificial Sequence
  Targeting domain
acuaucucaaugcaaauaucugu

SEQ ID NO: 746 - RNA, 24 nt, Artificial Sequence
  Targeting domain
cacuaucucaaugcaaauaucugu

SEQ ID NO: 747 - RNA, 18 nt, Artificial Sequence
  Targeting domain
aguuccacacacucgcuu

SEQ ID NO: 748 - RNA, 19 nt, Artificial Sequence
  Targeting domain
caguuccacacacucgcuu

SEQ ID NO: 749 - RNA, 20 nt, Artificial Sequence
  Targeting domain
gcaguuccacacacucgcuu

SEQ ID NO: 750 - RNA, 21 nt, Artificial Sequence
  Targeting domain
agcaguuccacacacucgcuu

SEQ ID NO: 751 - RNA, 22 nt, Artificial Sequence
  Targeting domain
cagcaguuccacacacucgcuu

SEQ ID NO: 752 - RNA, 23 nt, Artificial Sequence
  Targeting domain
ucagcaguuccacacacucgcuu

SEQ ID NO: 753 - RNA, 24 nt, Artificial Sequence
  Targeting domain
uucagcaguuccacacacucgcuu

SEQ ID NO: 754 - RNA, 18 nt, Artificial Sequence
  Targeting domain
aauuagcaguauccucuu

SEQ ID NO: 755 - RNA, 19 nt, Artificial Sequence
  Targeting domain
aaauuagcaguauccucuu

SEQ ID NO: 756 - RNA, 21 nt, Artificial Sequence
  Targeting domain
aaaaauuagcaguauccucuu

SEQ ID NO: 757 - RNA, 22 nt, Artificial Sequence
  Targeting domain
aaaaaauuagcaguauccucuu

SEQ ID NO: 758 - RNA, 23 nt, Artificial Sequence
  Targeting domain
aaaaaaauuagcaguauccucuu

SEQ ID NO: 759 - RNA, 24 nt, Artificial Sequence
  Targeting domain
aaaaaaaauuagcaguauccucuu

SEQ ID NO: 760 - RNA, 17 nt, Artificial Sequence
  Targeting domain
gaagaaaacuagcuaaa

SEQ ID NO: 761 - RNA, 17 nt, Artificial Sequence
  Targeting domain
gcagcaguauccucuug

SEQ ID NO: 762 - RNA, 20 nt, Artificial Sequence
  Targeting domain
ggagaagaaaacuagcuaaa

SEQ ID NO: 763 - RNA, 20 nt, Artificial Sequence
  Targeting domain
gggagaagaaaacuagcuaa

SEQ ID NO: 764 - RNA, 20 nt, Artificial Sequence
  Targeting domain
guccugguaucuucuauggu

SEQ ID NO: 765 - RNA, 17 nt, Artificial Sequence
  Targeting domain
agaagaaaacuagcuaa

SEQ ID NO: 766 - RNA, 17 nt, Artificial Sequence
  Targeting domain
aguccugguaucuucua

SEQ ID NO: 767 - RNA, 17 nt, Artificial Sequence
  Targeting domain
ccaccauagaagauacc

SEQ ID NO: 768 - RNA, 17 nt, Artificial Sequence
  Targeting domain
ccugguaucuucuaugg

SEQ ID NO: 769 - RNA, 17 nt, Artificial Sequence
  Targeting domain
cagcaguauccucuugg

SEQ ID NO: 770 - RNA, 17 nt, Artificial Sequence
  Targeting domain
aauuggaaugacugaau

SEQ ID NO: 771 - RNA, 17 nt, Artificial Sequence
  Targeting domain
cugguaucuucuauggu

SEQ ID NO: 772 - RNA, 17 nt, Artificial Sequence
  Targeting domain
agcagcaguauccucuu

SEQ ID NO: 773 - RNA, 20 nt, Artificial Sequence
  Targeting domain
agaaguccugguaucuucua

SEQ ID NO: 774 - RNA, 20 nt, Artificial Sequence
  Targeting domain
cucccaccauagaagauacc

SEQ ID NO: 775 - RNA, 20 nt, Artificial Sequence
  Targeting domain
aguccugguaucuucuaugg

SEQ ID NO: 776 - RNA, 20 nt, Artificial Sequence
  Targeting domain
aagcagcaguauccucuugg

SEQ ID NO: 777 - RNA, 20 nt, Artificial Sequence
  Targeting domain
uaagcagcaguauccucuug

SEQ ID NO: 778 - RNA, 20 nt, Artificial Sequence
  Targeting domain
agaauaaauuagagaaaaau

SEQ ID NO: 779 - RNA, 20 nt, Artificial Sequence
  Targeting domain
aaaaauuggaaugacugaau

SEQ ID NO: 780 - RNA, 20 nt, Artificial Sequence
  Targeting domain
auuaagcagcaguauccucu

SEQ ID NO: 781 - RNA, 20 nt, Artificial Sequence
  Targeting domain
uuaagcagcaguauccucuu

SEQ ID NO: 782 - RNA, 17 nt, Artificial Sequence
  Targeting domain
auaaauuagagaaaaau

SEQ ID NO: 783 - RNA, 17 nt, Artificial Sequence
  Targeting domain
aagcagcaguauccucu

SEQ ID NO: 784 - RNA, 20 nt, Artificial Sequence
  Targeting domain
gaagaaaacuagcuaaaggg

SEQ ID NO: 785 - RNA, 22 nt, Artificial Sequence
  Targeting domain
gagaagaaaacuagcuaaaggg

SEQ ID NO: 786 - RNA, 23 nt, Artificial Sequence
  Targeting domain
ggagaagaaaacuagcuaaaggg

SEQ ID NO: 787 - RNA, 24 nt, Artificial Sequence
  Targeting domain
gggagaagaaaacuagcuaaaggg

SEQ ID NO: 788 - RNA, 19 nt, Artificial Sequence
  Targeting domain
gaauaaauuagagaaaaau

SEQ ID NO: 789 - RNA, 22 nt, Artificial Sequence
  Targeting domain
gaagaauaaauuagagaaaaau

SEQ ID NO: 790 - RNA, 23 nt, Artificial Sequence
  Targeting domain
ggaagaauaaauuagagaaaaau

SEQ ID NO: 791 - RNA, 24 nt, Artificial Sequence
  Targeting domain
gggaagaauaaauuagagaaaaau

SEQ ID NO: 792 - RNA, 18 nt, Artificial Sequence
  Targeting domain
agagaaaaauuggaauga

SEQ ID NO: 793 - RNA, 19 nt, Artificial Sequence
  Targeting domain
uagagaaaaauuggaauga

SEQ ID NO: 794 - RNA, 20 nt, Artificial Sequence
  Targeting domain
uuagagaaaaauuggaauga

SEQ ID NO: 795 - RNA, 21 nt, Artificial Sequence
  Targeting domain
auuagagaaaaauuggaauga

SEQ ID NO: 796 - RNA, 22 nt, Artificial Sequence
  Targeting domain
aauuagagaaaaauuggaauga

SEQ ID NO: 797 - RNA, 23 nt, Artificial Sequence
  Targeting domain
aaauuagagaaaaauuggaauga

SEQ ID NO: 798 - RNA, 24 nt, Artificial Sequence
  Targeting domain
uaaauuagagaaaaauuggaauga

SEQ ID NO: 799 - RNA, 18 nt, Artificial Sequence
  Targeting domain
agaaaacuagcuaaaggg

SEQ ID NO: 800 - RNA, 19 nt, Artificial Sequence
  Targeting domain
aagaaaacuagcuaaaggg

SEQ ID NO: 801 - RNA, 21 nt, Artificial Sequence
  Targeting domain
agaagaaaacuagcuaaaggg

SEQ ID NO: 802 - RNA, 18 nt, Artificial Sequence
  Targeting domain
aauaaauuagagaaaaau

SEQ ID NO: 803 - RNA, 21 nt, Artificial Sequence
  Targeting domain
aagaauaaauuagagaaaaau

SEQ ID NO: 804 - RNA, 18 nt, Artificial Sequence
  Targeting domain
aguuuucuucucccacca

SEQ ID NO: 805 - RNA, 19 nt, Artificial Sequence
  Targeting domain
uaguuuucuucucccacca

SEQ ID NO: 806 - RNA, 20 nt, Artificial Sequence
  Targeting domain
cuaguuuucuucucccacca

SEQ ID NO: 807 - RNA, 21 nt, Artificial Sequence
  Targeting domain
gcuaguuuucuucucccacca

SEQ ID NO: 808 - RNA, 22 nt, Artificial Sequence
  Targeting domain
agcuaguuuucuucucccacca

SEQ ID NO: 809 - RNA, 23 nt, Artificial Sequence
  Targeting domain
uagcuaguuuucuucucccacca

SEQ ID NO: 810 - RNA, 24 nt, Artificial Sequence
  Targeting domain
uuagcuaguuuucuucucccacca

SEQ ID NO: 811 - RNA, 18 nt, Artificial Sequence
  Targeting domain
ucccaccauagaagauac

SEQ ID NO: 812 - RNA, 19 nt, Artificial Sequence
  Targeting domain
cucccaccauagaagauac

SEQ ID NO: 813 - RNA, 20 nt, Artificial Sequence
  Targeting domain
ucucccaccauagaagauac

SEQ ID NO: 814 - RNA, 21 nt, Artificial Sequence
  Targeting domain
uucucccaccauagaagauac

SEQ ID NO: 815 - RNA, 22 nt, Artificial Sequence
  Targeting domain
cuucucccaccauagaagauac

SEQ ID NO: 816 - RNA, 23 nt, Artificial Sequence
  Targeting domain
ucuucucccaccauagaagauac

SEQ ID NO: 817 - RNA, 24 nt, Artificial Sequence
  Targeting domain
uucuucucccaccauagaagauac

SEQ ID NO: 818 - RNA, 18 nt, Artificial Sequence
  Targeting domain
agaagaaaacuagcuaaa

SEQ ID NO: 819 - RNA, 19 nt, Artificial Sequence
  Targeting domain
gagaagaaaacuagcuaaa

SEQ ID NO: 820 - RNA, 21 nt, Artificial Sequence
  Targeting domain
gggagaagaaaacuagcuaaa

SEQ ID NO: 821 - RNA, 22 nt, Artificial Sequence
  Targeting domain
ugggagaagaaaacuagcuaaa

SEQ ID NO: 822 - RNA, 23 nt, Artificial Sequence
  Targeting domain
gugggagaagaaaacuagcuaaa

SEQ ID NO: 823 - RNA, 24 nt, Artificial Sequence
  Targeting domain
ggugggagaagaaaacuagcuaaa

SEQ ID NO: 824 - RNA, 18 nt, Artificial Sequence
  Targeting domain
aaaauuggaaugacugaa

SEQ ID NO: 825 - RNA, 19 nt, Artificial Sequence
  Targeting domain
aaaaauuggaaugacugaa

SEQ ID NO: 826 - RNA, 20 nt, Artificial Sequence
  Targeting domain
gaaaaauuggaaugacugaa

SEQ ID NO: 827 - RNA, 21 nt, Artificial Sequence
  Targeting domain
agaaaaauuggaaugacugaa

SEQ ID NO: 828 - RNA, 22 nt, Artificial Sequence
  Targeting domain
gagaaaaauuggaaugacugaa

SEQ ID NO: 829 - RNA, 23 nt, Artificial Sequence
  Targeting domain
agagaaaaauuggaaugacugaa

SEQ ID NO: 830 - RNA, 24 nt, Artificial Sequence
  Targeting domain
uagagaaaaauuggaaugacugaa

SEQ ID NO: 831 - RNA, 18 nt, Artificial Sequence
  Targeting domain
gagaagaaaacuagcuaa

SEQ ID NO: 832 - RNA, 19 nt, Artificial Sequence
  Targeting domain
ggagaagaaaacuagcuaa

SEQ ID NO: 833 - RNA, 21 nt, Artificial Sequence
  Targeting domain
ugggagaagaaaacuagcuaa

SEQ ID NO: 834 - RNA, 22 nt, Artificial Sequence
  Targeting domain
gugggagaagaaaacuagcuaa

SEQ ID NO: 835 - RNA, 23 nt, Artificial Sequence
  Targeting domain
ggugggagaagaaaacuagcuaa

SEQ ID NO: 836 - RNA, 24 nt, Artificial Sequence
  Targeting domain
uggugggagaagaaaacuagcuaa

SEQ ID NO: 837 - RNA, 18 nt, Artificial Sequence
  Targeting domain
ggagaagaaaacuagcua

SEQ ID NO: 838 - RNA, 19 nt, Artificial Sequence
  Targeting domain
gggagaagaaaacuagcua

SEQ ID NO: 839 - RNA, 20 nt, Artificial Sequence
  Targeting domain
ugggagaagaaaacuagcua

SEQ ID NO: 840 - RNA, 21 nt, Artificial Sequence
  Targeting domain
gugggagaagaaaacuagcua

SEQ ID NO: 841 - RNA, 22 nt, Artificial Sequence
  Targeting domain
ggugggagaagaaaacuagcua

SEQ ID NO: 842 - RNA, 23 nt, Artificial Sequence
  Targeting domain
uggugggagaagaaaacuagcua

SEQ ID NO: 843 - RNA, 24 nt, Artificial Sequence
  Targeting domain
auggugggagaagaaaacuagcua

SEQ ID NO: 844 - RNA, 18 nt, Artificial Sequence
  Targeting domain
uuaagcagcaguauccuc

SEQ ID NO: 845 - RNA, 19 nt, Artificial Sequence
  Targeting domain
auuaagcagcaguauccuc

SEQ ID NO: 846 - RNA, 20 nt, Artificial Sequence
  Targeting domain
aauuaagcagcaguauccuc

SEQ ID NO: 847 - RNA, 21 nt, Artificial Sequence
  Targeting domain
aaauuaagcagcaguauccuc

SEQ ID NO: 848 - RNA, 22 nt, Artificial Sequence
  Targeting domain
aaaauuaagcagcaguauccuc

SEQ ID NO: 849 - RNA, 23 nt, Artificial Sequence
  Targeting domain
aaaaauuaagcagcaguauccuc

SEQ ID NO: 850 - RNA, 24 nt, Artificial Sequence
  Targeting domain
aaaaaauuaagcagcaguauccuc

SEQ ID NO: 851 - RNA, 18 nt, Artificial Sequence
  Targeting domain
uaucuucuauggugggag

SEQ ID NO: 852 - RNA, 19 nt, Artificial Sequence
  Targeting domain
guaucuucuauggugggag

SEQ ID NO: 853 - RNA, 20 nt, Artificial Sequence
  Targeting domain
gguaucuucuauggugggag

SEQ ID NO: 854 - RNA, 21 nt, Artificial Sequence
  Targeting domain
ugguaucuucuauggugggag

SEQ ID NO: 855 - RNA, 22 nt, Artificial Sequence
  Targeting domain
cugguaucuucuauggugggag

SEQ ID NO: 856 - RNA, 23 nt, Artificial Sequence
  Targeting domain
ccugguaucuucuauggugggag

SEQ ID NO: 857 - RNA, 24 nt, Artificial Sequence
  Targeting domain
uccugguaucuucuauggugggag

SEQ ID NO: 858 - RNA, 18 nt, Artificial Sequence
  Targeting domain
uccugguaucuucuaugg

SEQ ID NO: 859 - RNA, 19 nt, Artificial Sequence
  Targeting domain
guccugguaucuucuaugg

SEQ ID NO: 860 - RNA, 21 nt, Artificial Sequence
  Targeting domain
aaguccugguaucuucuaugg

SEQ ID NO: 861 - RNA, 22 nt, Artificial Sequence
  Targeting domain
gaaguccugguaucuucuaugg

SEQ ID NO: 862 - RNA, 23 nt, Artificial Sequence
  Targeting domain
agaaguccugguaucuucuaugg

SEQ ID NO: 863 - RNA, 24 nt, Artificial Sequence
  Targeting domain
aagaaguccugguaucuucuaugg

SEQ ID NO: 864 - RNA, 18 nt, Artificial Sequence
  Targeting domain
ugguaucuucuauggugg

SEQ ID NO: 865 - RNA, 19 nt, Artificial Sequence
  Targeting domain
cugguaucuucuauggugg

SEQ ID NO: 866 - RNA, 20 nt, Artificial Sequence
  Targeting domain
ccugguaucuucuauggugg

SEQ ID NO: 867 - RNA, 21 nt, Artificial Sequence
  Targeting domain
uccugguaucuucuauggugg

SEQ ID NO: 868 - RNA, 22 nt, Artificial Sequence
  Targeting domain
guccugguaucuucuauggugg

SEQ ID NO: 869 - RNA, 23 nt, Artificial Sequence
  Targeting domain
aguccugguaucuucuauggugg

SEQ ID NO: 870 - RNA, 24 nt, Artificial Sequence
  Targeting domain
aaguccugguaucuucuauggugg

SEQ ID NO: 871 - RNA, 18 nt, Artificial Sequence
  Targeting domain
guccugguaucuucuaug

SEQ ID NO: 872 - RNA, 19 nt, Artificial Sequence
  Targeting domain
aguccugguaucuucuaug

SEQ ID NO: 873 - RNA, 20 nt, Artificial Sequence
  Targeting domain
aaguccugguaucuucuaug

SEQ ID NO: 874 - RNA, 21 nt, Artificial Sequence
  Targeting domain
gaaguccugguaucuucuaug

SEQ ID NO: 875 - RNA, 22 nt, Artificial Sequence
  Targeting domain
agaaguccugguaucuucuaug

SEQ ID NO: 876 - RNA, 23 nt, Artificial Sequence
  Targeting domain
aagaaguccugguaucuucuaug

SEQ ID NO: 877 - RNA, 24 nt, Artificial Sequence
  Targeting domain
aaagaaguccugguaucuucuaug

SEQ ID NO: 878 - RNA, 18 nt, Artificial Sequence
  Targeting domain
aaauuggaaugacugaau

SEQ ID NO: 879 - RNA, 19 nt, Artificial Sequence
  Targeting domain
aaaauuggaaugacugaau

SEQ ID NO: 880 - RNA, 21 nt, Artificial Sequence
  Targeting domain
gaaaaauuggaaugacugaau

SEQ ID NO: 881 - RNA, 22 nt, Artificial Sequence
  Targeting domain
agaaaaauuggaaugacugaau

SEQ ID NO: 882 - RNA, 23 nt, Artificial Sequence
  Targeting domain
gagaaaaauuggaaugacugaau

SEQ ID NO: 883 - RNA, 24 nt, Artificial Sequence
  Targeting domain
agagaaaaauuggaaugacugaau

SEQ ID NO: 884 - RNA, 18 nt, Artificial Sequence
  Targeting domain
uaagcagcaguauccucu

SEQ ID NO: 885 - RNA, 19 nt, Artificial Sequence
  Targeting domain
uuaagcagcaguauccucu

SEQ ID NO: 886 - RNA, 21 nt, Artificial Sequence
  Targeting domain
aauuaagcagcaguauccucu

SEQ ID NO: 887 - RNA, 22 nt, Artificial Sequence
  Targeting domain
aaauuaagcagcaguauccucu

SEQ ID NO: 888 - RNA, 23 nt, Artificial Sequence
  Targeting domain
aaaauuaagcagcaguauccucu

SEQ ID NO: 889 - RNA, 24 nt, Artificial Sequence
  Targeting domain
aaaaauuaagcagcaguauccucu

SEQ ID NO: 890 - RNA, 18 nt, Artificial Sequence
  Targeting domain
ccugguaucuucuauggu

SEQ ID NO: 891 - RNA, 19 nt, Artificial Sequence
  Targeting domain
uccugguaucuucuauggu

SEQ ID NO: 892 - RNA, 21 nt, Artificial Sequence
  Targeting domain
aguccugguaucuucuauggu

SEQ ID NO: 893 - RNA, 22 nt, Artificial Sequence
  Targeting domain
aaguccugguaucuucuauggu

SEQ ID NO: 894 - RNA, 23 nt, Artificial Sequence
  Targeting domain
gaaguccugguaucuucuauggu

SEQ ID NO: 895 - RNA, 24 nt, Artificial Sequence
  Targeting domain
agaaguccugguaucuucuauggu

SEQ ID NO: 896 - RNA, 18 nt, Artificial Sequence
  Targeting domain
aagcagcaguauccucuu

SEQ ID NO: 897 - RNA, 19 nt, Artificial Sequence
  Targeting domain
uaagcagcaguauccucuu

SEQ ID NO: 898 - RNA, 21 nt, Artificial Sequence
  Targeting domain
auuaagcagcaguauccucuu

SEQ ID NO: 899 - RNA, 22 nt, Artificial Sequence
  Targeting domain
aauuaagcagcaguauccucuu

SEQ ID NO: 900 - RNA, 23 nt, Artificial Sequence
  Targeting domain
aaauuaagcagcaguauccucuu

SEQ ID NO: 901 - RNA, 24 nt, Artificial Sequence
  Targeting domain
aaaauuaagcagcaguauccucuu

SEQ ID NO: 902 - DNA, 4758 bp, Homo sapiens
  misc_feature (2716)..(2719): HPFH deletion site (4 bp del -225 to -222)
  misc_feature (2748)..(2753): GATA1 binding motif
  misc_feature (2762)..(2767): GATA1 binding motif
  misc_feature (2791)..(2799): FKLF transcription factor binding motif
  misc_feature (2823)..(2830): CP1/Coup TFII binding motif
  misc_feature (2824)..(2836): HPFH deletion site (13 bp del -114 to -102)
  misc_feature (2991)..(2993): Start codon
tttaggaagtcaaggtttaggcagggatagccattctattttattaggggcaatactatttccaacggcatctggcttttctcagcccttgtgaggctctacagggaggttgaggtgttagagatcagagcaggaaacaggtttttctttccacggtaactacaatgaagtgatccttactttactaaggaacttttcattttaagtgttgacgcatgcctaaagaggtgaaattaatcccatacccttaagtctacagactggtcacagcatttcaaggaggagacctcattgtaagcttctagggaggtggggacttaggtgaaggaaatgagccagcagaagctcacaagtcagcatcagcgtgtcatgtctcagcagcagaacagcacggtcagatgaaaatatagtgtgaagaatttgtataacattaattgagaaggcagattcactggagttcttatataattgaaagttaatgcacgttaataagcaagagtttagtttaatgtgatggtgttatgaacttaacgcttgtgtctccagaaaattcacatgctgaatccccaactcccaattggctccatttgtgggggaggctttggaaaagtaatcaggtttagaggagctcatgagagcagatccccatcatagaattattttcctcatcagaagcagagagattagccatttctcttccttctggtgaggacacagtgggaagtcagccacctgcaacccaggaagagagccctgaccaggaaccagcagaaaagtgagaaaaaatcctgttgttgaagtcacccagtctatgctattttgttatagcaccttgcactaagtaaggcagatgaagaaagagaaaaaaataagcttcggtgttcagtggattagaaaccatgtttatctcaggtttacaaatctccacttgtcctctgtgtttcagaataaaataccaactctactactctcatctgtaagatgcaaatagtaagcctgagcccttctgtctaactttgaattctattttttcttcaacgtactttaggcttgtaatgtgtttatatacagtgaaatgtcaagttctttctttatatttctttctttcttttttttcctcagcctcagagttttccacatgcccttcctactttcaggaacttctttctccaaacgtcttctgcctggctccatcaaatcataaaggacccacttcaaatgccatcactcactaccatttcacaattcgcactttctttctttgtcctttttttttttagtaaaacaagtttataaaaaattgaaggaataaatgaatggctacttcataggcagagtagacgcaagggctactggttgccgatttttattgttatttttcaatagtatgctaaacaaggggtagattatttatgctgcccatttttagaccataaaagataacttcctgatgttgccatggcatttttttccttttaattttatttcatttcattttaatttcgaaggtacatgtgcaggatgtgcaggcttgttacatgggtaaatgtgtgtctttctggccttttagccatctgtatcaatgagcagatataagctttacacaggatcatgaaggatgaaagaatttcaccaatattataataatttcaatcaacctgatagcttaggggataaactaatttgaagatacagcttgcctccgataagccagaattccagagcttctggcattataatctagcaaggttagagatcatggatcactttcagagaaaaacaaaaacaaactaaccaaaagcaaaacagaaccaaaaaaccaccataaatacttcctaccctgttaatggtccaatatgtcagaaacagcactgtgttagaaataaagctgtctaaagtacactaatattcgagttataatagtgtgtggactattagtcaataaaaacaacccttgcctctttagagttgttttccatgtacacgcacatcttatgtcttagagtaagattccctgagaagtgaacctagcatttatacaagataattaattctaatccacagtacctgccaaagaacattctaccatcatctttactgagcatagaagagctacgccaaaaccctgggtcatcagccagcacacacacttatccagtggtaaatacacatcatctggtgtatacatacatacctgaatatggaatcaaatatttttctaagatgaaacagtcatgatttatttcaaataggtacggataagtagatattgaggtaagcattaggtcttatattatgtaacactaatctattactgcgctgaaactgtggctttatagaaattgttttcactgcactattgagaaattaagagataatggcaaaagtcacaaagagtatattcaaaaagaagtatagcactttttccttagaaaccactgctaactgaaagagactaagatttgtcccgtcaaaaatcctggacctatgcctaaaacacatttcacaatccctgaacttttcaaaaattggtacatgctttagctttaaactacaggcctcactggagctagagacaagaaggtaaaaaacggctgacaaaagaagtcctggtatcctctatgatgggagaaggaaactagctaaagggaagaataaattagagaaaaactggaatgactgaatcggaacaaggcaaaggctataaaaaaaattagcagtatcctcttgggggccccttccccacactatctcaatgcaaatatctgtctgaaacggtccctggctaaactccacccatgggttggccagccttgccttgaccaatagccttgacaaggcaaacttgaccaatagtcttagagtatccagtgaggccaggggccggcggctggctagggatgaagaataaaaggaagcacccttcagcagttccacacactcgcttctggaacgtctgaggttatcaataagctcctagtccagacgccatgggtcatttcacagaggaggacaaggctactatcacaagcctgtggggcaaggtgaatgtggaagatgctggaggagaaaccctgggaaggtaggctctggtgaccaggacaagggagggaaggaaggaccctgtgcctggcaaaagtccaggtcgcttctcaggatttgtggcaccttctgactgtcaaactgttcttgtcaatctcacaggctcctggttgtctacccatggacccagaggttctttgacagctttggcaacctgtcctctgcctctgccatcatgggcaaccccaaagtcaaggcacatggcaagaaggtgctgacttccttgggagatgccacaaagcacctggatgatctcaagggcacctttgcccagctgagtgaactgcactgtgacaagctgcatgtggatcctgagaacttcaaggtgagtccaggagatgtttcagccctgttgcctttagtctcgaggcaacttagacaacggagtattgatctgagcacagcagggtgtgagctgtttgaagatactggggttgggggtgaagaaactgcagaggactaactgggctgagacccagtggtaatgttttagggcctaaggagtgcctctaaaaatctagatggacaattttgactttgagaaaagagaggtggaaatgaggaaaatgacttttctttattagattccagtagaaagaactttcatctttccctcatttttgttgttttaaaacatctatctggaggcaggacaagtatggtcgttaaaaagatgcaggcagaaggcatatattggctcagtcaaagtggggaactttggtggccaaacatacattgctaaggctattcctatatcagctggacacatataaaatgctgctaatgcttcattacaaacttatatcctttaattccagatgggggcaaagtatgtccaggggtgaggaacaattgaaacatttgggctggagtagattttgaaagtcagctctgtgtgtgtgtgtgtgtgtgcgcgcgcgcgtgtgtgtgtgtgtgtcagcgtgtgtttcttttaacgtcttcagcctacaacatacagggttcatggtggcaagaagatagcaagatttaaattatggccagtgactagtgcttgaaggggaacaactacctgcatttaatgggaaggcaaaatctcaggctttgagggaagttaacataggcttgattctgggtggaagcttggtgtgtagttatctggaggccaggctggagctctcagctcactatgggttcatctttattgtctcctttcatctcaacagctcctgggaaatgtgctggtgaccgttttggcaatccatttcggcaaagaattcacccctgaggtgcaggcttcctggcagaagatggtgactgcagtggccagtgccctgtcctccagataccactgagctcactgcccatgattcagagctttcaaggataggctttattctgcaagcaatacaaataataaatctattctgctgagagatcacacatgattttcttcagctcttttttttacatctttttaaatatatgagccacaaagggtttatattgagggaagtgtgtatgtgtatttctgcatgcctgtttgtgtttgtggtgtgtgcatgctcctcatttatttttatatgagatgtgcattttgatgagcaaataaaagcagtaaagacacttgtacacgggagttctgcaagtgggagtaaatggtgtaggagaaatccg

SEQ ID NO: 903 - DNA, 4773 bp, Homo sapiens
  misc_feature (1233)..(1238): GATA1 binding site
  misc_feature (2672)..(2677): GATA1 binding site
  misc_feature (2686)..(2691): GATA1 binding site
  misc_feature (2715)..(2723): FKLF transcription factor binding motif
  misc_feature (2747)..(2754): CP1/Coup TFII binding motif
  misc_feature (2748)..(2760): HPFH deletion site (13 bp del -114 to -102)
  misc_feature (2915)..(2917): Start codon
ttatgtcattaccagagttaaaattctataatggcttctcactccctaccactgaggacaagtttatgtccttaggtttatgcttccctgaaacaataccacctgctattctccactttacatatcaacggcactggttctttatctaactctctggcacagcaggagtttgttttcttctgcttcagagctttgaatttactatttcagcttctaaactttatttggcaatgccttcccatggcagattccttctgtcattttgcctctgttcgaatactttctccttaatttcattcttagttaataatatctgaaattattttgttgtttaacttaattattaattttatgtatgttctacctagattataatcttcagaggaaagttttattctctgacttatttaacttaaatgcccactactttaaaaattatgacatttatttaacagatatttgctgaacaaatgtttgaaaatacatgggaaagaatgcttgaaaacacttgaaattgcttgtgtaaagaaacagttttatcagttaggatttaatcaatgtcagaagcaatgatataggaaaaatcgaggaataagacagttatggataaggagaaatcaacaaactcttaaaagatattgcctcaaaagcataagaggaaataagggtttatacatgacttttagaacactgccttggtttttggataaatggggaagttgtttgaaaacaggagggatcctagatattccttagtctgaggaggagcaattaagattcacttgtttagaggctgggagtggtggctcacgcctgtaatcccagaattttgggaggccaaggcaggcagatcacctgaggtcaagagttcaagaccaacctggccaacatggtgaaatcccatctctacaaaaatacaaaaattagacaggcatgatggcaagtgcctgtaatcccagctacttgggaggctgaggaaggagaattgcttgaacctggaaggcaggagttgcagtgagccgagatcataccactgcactccagcctgggtgacagaacaagactctgtctcaaaaaaaaaaaagagagattcaaaagattcacttgtttaggccttagcgggcttagacaccagtctctgacacattcttaaaggtcaggctctacaaatggaacccaaccagactctcagatatggccaaagatctatacacacccatctcacagatcccctatcttaaagagaccctaatttgggttcacctcagtctctataatctgtaccagcataccaataaaaatctttctcacccatccttagattgagagaagtcacttattattatgtgagtaactggaagatactgataagttgacaaatctttttctttcctttcttattcaacttttattttaacttccaaagaacaagtgcaatatgtgcagctttgttgcgcaggtcaacatgtatctttctggtcttttagccgcctaacactttgagcagatataagccttacacaggattatgaagtctgaaaggattccaccaatattattataattcctatcaacctgataggttaggggaaggtagagctctcctccaataagccagatttccagagtttctgacgtcataatctaccaaggtcatggatcgagttcagagaaaaaacaaaagcaaaaccaaacctaccaaaaaataaaaatcccaaagaaaaaataaagaaaaaaacagcatgaatacttcctgccatgttaagtggccaatatgtcagaaacagcactgagttacagataaagatgtctaaactacagtgacatcccagctgtcacagtgtgtggactattagtcaataaaacagtccctgcctcttaagagttgttttccatgcaaatacatgtcttatgtcttagaataagattccctaagaagtgaacctagcatttatacaagataattaattctaatccatagtatctggtaaagagcattctaccatcatctttaccgagcatagaagagctacaccaaaaccctgggtcatcagccagcacatacacttatccagtgataaatacacatcatcgggtgcctacatacatacctgaatataaaaaaaatacttttgctgagatgaaacaggcgtgatttatttcaaataggtacggataagtagatattgaagtaaggattcagtcttatattatattacataacattaatctattcctgcactgaaactgttgctttataggatttttcactacactaatgagaacttaagagataatggcctaaaaccacagagagtatattcaaagataagtatagcacttcttatttggaaaccaatgcttactaaatgagactaagacgtgtcccatcaaaaatcctggacctatgcctaaaacacatttcacaatccctgaacttttcaaaaattggtacatgctttaactttaaactacaggcctcactggagctacagacaagaaggtgaaaaacggctgacaaaagaagtcctggtatcttctatggtgggagaagaaaactagctaaagggaagaataaattagagaaaaattggaatgactgaatcggaacaaggcaaaggctataaaaaaaattaagcagcagtatcctcttgggggccccttccccacactatctcaatgcaaatatctgtctgaaacggtccctggctaaactccacccatgggttggccagccttgccttgaccaatagccttgacaaggcaaacttgaccaatagtcttagagtatccagtgaggccaggggccggcggctggctagggatgaagaataaaaggaagcacccttcagcagttccacacactcgcttctggaacgtctgaggttatcaataagctcctagtccagacgccatgggtcatttcacagaggaggacaaggctactatcacaagcctgtggggcaaggtgaatgtggaagatgctggaggagaaaccctgggaaggtaggctctggtgaccaggacaagggagggaaggaaggaccctgtgcctggcaaaagtccaggtcgcttctcaggatttgtggcaccttctgactgtcaaactgttcttgtcaatctcacaggctcctggttgtctacccatggacccagaggttctttgacagctttggcaacctgtcctctgcctctgccatcatgggcaaccccaaagtcaaggcacatggcaagaaggtgctgacttccttgggagatgccataaagcacctggatgatctcaagggcacctttgcccagctgagtgaactgcactgtgacaagctgcatgtggatcctgagaacttcaaggtgagtccaggagatgtttcagcactgttgcctttagtctcgaggcaacttagacaactgagtattgatctgagcacagcagggtgtgagctgtttgaagatactggggttgggagtgaagaaactgcagaggactaactgggctgagacccagtggcaatgttttagggcctaaggagtgcctctgaaaatctagatggacaactttgactttgagaaaagagaggtggaaatgaggaaaatgacttttctttattagatttcggtagaaagaactttcacctttcccctatttttgttattcgttttaaaacatctatctggaggcaggacaagtatggtcattaaaaagatgcaggcagaaggcatatattggctcagtcaaagtggggaactttggtggccaaacatacattgctaaggctattcctatatcagctggacacatataaaatgctgctaatgcttcattacaaacttatatcctttaattccagatgggggcaaagtatgtccaggggtgaggaacaattgaaacatttgggctggagtagattttgaaagtcagctctgtgtgtgtgtgtgtgtgtgtgcgcgcgtgtgtttgtgtgtgtgtgagagcgtgtgtttcttttaacgttttcagcctacagcatacagggttcatggtggcaagaagataacaagatttaaattatggccagtgactagtgctgcaagaagaacaactacctgcatttaatgggaaagcaaaatctcaggctttgagggaagttaacataggcttgattctgggtggaagcttggtgtgtagttatctggaggccaggctggagctctcagctcactatgggttcatctttattgtctcctttcatctcaacagctcctgggaaatgtgctggtgaccgttttggcaatccatttcggcaaagaattcacccctgaggtgcaggcttcctggcagaagatggtgactggagtggccagtgccctgtcctccagataccactgagctcactgcccatgatgcagagctttcaaggataggctttattctgcaagcaatcaaataataaatctattctgctaagagatcacacatggttgtcttcagttctttttttatgtctttttaaatatatgagccacaaagggttttatgttgagggatgtgtttatgtgtatttatacatggctatgtgtgtttgtgtcatgtgcacactccacacttttttgtttacgttagatgtgggttttgatgagcaaataaaagaactaggcaataaagaaacttgtacatgggagttctgcaagtgggagtaaaaggtgcaggagaaatctggttggaagaaagacctctataggacaggactcctcagaaacagatgttttggaagagatggggaaaggttcagtgaa

SEQ ID NO: 904 - DNA, 87 bp, Artificial Sequence
  ssODN1 5' homology arm
gggtgcttccttttattcttcatccctagccagccgccggcccctggcctcactggatactctaagactattggtcaagtttgcctt

SEQ ID NO: 905 - DNA, 89 bp, Artificial Sequence
  ssODN1 3' homology arm
gtcaaggcaaggctggccaacccatgggtggagtttagccagggaccgtttcagacagatatttgcattgagatagtgtggggaagggg

SEQ ID NO: 906 - DNA, 176 bp, Artificial Sequence
  ssODN1
gggtgcttccttttattcttcatccctagccagccgccggcccctggcctcactggatactctaagactattggtcaagtttgccttgtcaaggcaaggctggccaacccatgggtggagtttagccagggaccgtttcagacagatatttgcattgagatagtgtggggaagggg

SEQ ID NO: 907 - DNA, 87 bp, Artificial Sequence; identical to SEQ ID NO: 904
  PhTx ssODN1 5' homology arm
  misc_feature (1)..(2): Linked by phosphorothioate (PS) bond

SEQ ID NO: 908 - DNA, 89 bp, Artificial Sequence; identical to SEQ ID NO: 905
  PhTx ssODN1 3' homology arm
  misc_feature (88)..(89): Linked by phosphorothioate (PS) bond

SEQ ID NO: 909 - DNA, 176 bp, Artificial Sequence; identical to SEQ ID NO: 906
  PhTx ssODN1
  misc_feature (1)..(2): Linked by phosphorothioate (PS) bond
  misc_feature (175)..(176): Linked by phosphorothioate (PS) bond

SEQ ID NO: 910 - DNA, 17 bp, Artificial Sequence
  targeting domain
ggctattggtcaaggca

SEQ ID NO: 911 - DNA, 20 bp, Artificial Sequence
  targeting domain
caaggctattggtcaaggca

SEQ ID NO: 912 - DNA, 17 bp, Artificial Sequence
  targeting domain
tgccttgtcaaggctat

SEQ ID NO: 913 - DNA, 20 bp, Artificial Sequence
  targeting domain
gtttgccttgtcaaggctat

SEQ ID NO: 914 - DNA, 17 bp, Artificial Sequence
  targeting domain
gaccaatagccttgaca

SEQ ID NO: 915 - DNA, 20 bp, Artificial Sequence
  targeting domain
cttgaccaatagccttgaca

SEQ ID NO: 916 - DNA, 17 bp, Artificial Sequence
  targeting domain
gtcaaggctattggtca

SEQ ID NO: 917 - DNA, 20 bp, Artificial Sequence
  targeting domain
cttgtcaaggctattggtca

SEQ ID NO: 918 - DNA, 17 bp, Artificial Sequence
  targeting domain
tcaagtttgccttgtca

SEQ ID NO: 919 - DNA, 20 bp, Artificial Sequence
  targeting domain
tggtcaagtttgccttgtca

SEQ ID NO: 920 - RNA, 20 nt, Artificial Sequence
  targeting domain plus PAM (NGG)
ggcuauuggucaaggcaagg

SEQ ID NO: 921 - RNA, 23 nt, Artificial Sequence
  targeting domain plus PAM (NGG)
caaggcuauuggucaaggcaagg

SEQ ID NO: 922 - RNA, 20 nt, Artificial Sequence
  targeting domain plus PAM (NGG)
ugccuugucaaggcuauugg

SEQ ID NO: 923 - RNA, 23 nt, Artificial Sequence
  targeting domain plus PAM (NGG)
guuugccuugucaaggcuauugg

SEQ ID NO: 924 - RNA, 20 nt, Artificial Sequence
  targeting domain plus PAM (NGG)
gaccaauagccuugacaagg

SEQ ID NO: 925 - RNA, 23 nt, Artificial Sequence
  targeting domain plus PAM (NGG)
cuugaccaauagccuugacaagg

SEQ ID NO: 926 - RNA, 20 nt, Artificial Sequence
  targeting domain plus PAM (NGG)
gucaaggcuauuggucaagg

SEQ ID NO: 927 - RNA, 23 nt, Artificial Sequence
  targeting domain plus PAM (NGG)
cuugucaaggcuauuggucaagg

SEQ ID NO: 928 - RNA, 20 nt, Artificial Sequence
  targeting domain plus PAM (NGG)
ucaaguuugccuugucaagg

SEQ ID NO: 929 - RNA, 23 nt, Artificial Sequence
  targeting domain plus PAM (NGG)
uggucaaguuugccuugucaagg

SEQ ID NO: 930 - DNA, 20 bp, Artificial Sequence
  targeting domain plus PAM (NGG)
ggctattggtcaaggcaagg

SEQ ID NO: 931 - DNA, 23 bp, Artificial Sequence
  targeting domain plus PAM (NGG)
caaggctattggtcaaggcaagg

SEQ ID NO: 932 - DNA, 20 bp, Artificial Sequence
  targeting domain plus PAM (NGG)
tgccttgtcaaggctattgg

SEQ ID NO: 933 - DNA, 23 bp, Artificial Sequence
  targeting domain plus PAM (NGG)
gtttgccttgtcaaggctattgg

SEQ ID NO: 934 - DNA, 20 bp, Artificial Sequence
  targeting domain plus PAM (NGG)
gaccaatagccttgacaagg

SEQ ID NO: 935 - DNA, 23 bp, Artificial Sequence
  targeting domain plus PAM (NGG)
cttgaccaatagccttgacaagg

SEQ ID NO: 936 - DNA, 20 bp, Artificial Sequence
  targeting domain plus PAM (NGG)
gtcaaggctattggtcaagg

SEQ ID NO: 937 - DNA, 23 bp, Artificial Sequence
  targeting domain plus PAM (NGG)
cttgtcaaggctattggtcaagg

SEQ ID NO: 938 - DNA, 20 bp, Artificial Sequence
  targeting domain plus PAM (NGG)
tcaagtttgccttgtcaagg

SEQ ID NO: 939 - DNA, 23 bp, Artificial Sequence
  targeting domain plus PAM (NGG)
tggtcaagtttgccttgtcaagg

SEQ ID NO: 940 - RNA, 17 nt, Artificial Sequence
  targeting domain
aguauccagugaggcca

SEQ ID NO: 941 - RNA, 20 nt, Artificial Sequence
  targeting domain
ggcaaggcuggccaacccau

SEQ ID NO: 942 - RNA, 20 nt, Artificial Sequence
  targeting domain
uauuugcauugagauagugu

SEQ ID NO: 943 - DNA, 17 bp, Artificial Sequence
  targeting domain
agtatccagtgaggcca

SEQ ID NO: 944 - DNA, 20 bp, Artificial Sequence
  targeting domain
ggcaaggctggccaacccat

SEQ ID NO: 945 - DNA, 20 bp, Artificial Sequence
  targeting domain
tatttgcattgagatagtgt

SEQ ID NO: 946 - RNA, 20 nt, Artificial Sequence
  targeting domain plus PAM (NGG)
aguauccagugaggccaggg

SEQ ID NO: 947 - RNA, 23 nt, Artificial Sequence
  targeting domain plus PAM (NGG)
ggcaaggcuggccaacccauggg

SEQ ID NO: 948 - RNA, 23 nt, Artificial Sequence
  targeting domain plus PAM (NGG)
uauuugcauugagauaguguggg

SEQ ID NO: 949 - DNA, 20 bp, Artificial Sequence
  targeting domain plus PAM (NGG)
agtatccagtgaggccaggg

SEQ ID NO: 950 - DNA, 23 bp, Artificial Sequence
  targeting domain plus PAM (NGG)
ggcaaggctggccaacccatggg

SEQ ID NO: 951 - DNA, 23 bp, Artificial Sequence
  targeting domain plus PAM (NGG)
tatttgcattgagatagtgtggg

SEQ ID NO: 952 - RNA, 20 nt, Artificial Sequence
  targeting domain
cuaacaguugcuuuuaucac

SEQ ID NO: 953 - RNA, 20 nt, Artificial Sequence
  targeting domain
gggcgugggugggguagaag

SEQ ID NO: 954 - RNA, 20 nt, Artificial Sequence
  targeting domain
cucuuagacauaacacacca

SEQ ID NO: 955 - RNA, 20 nt, Artificial Sequence
  targeting domain
aucagaggccaaacccuucc

SEQ ID NO: 956 - DNA, 20 bp, Artificial Sequence
  targeting domain
ctaacagttgcttttatcac

SEQ ID NO: 957 - DNA, 20 bp, Artificial Sequence
  targeting domain
gggcgtgggtggggtagaag

SEQ ID NO: 958 - DNA, 20 bp, Artificial Sequence
  targeting domain
ctcttagacataacacacca

SEQ ID NO: 959 - DNA, 20 bp, Artificial Sequence
  targeting domain
atcagaggccaaacccttcc

SEQ ID NO: 960 - RNA, 23 nt, Artificial Sequence
  targeting domain plus PAM (NGG)
cuaacaguugcuuuuaucacagg

SEQ ID NO: 961 - RNA, 23 nt, Artificial Sequence
  targeting domain plus PAM (NGG)
gggcgugggugggguagaagagg

SEQ ID NO: 962 - RNA, 23 nt, Artificial Sequence
  targeting domain plus PAM (NGG)
cucuuagacauaacacaccaggg

SEQ ID NO: 963 - RNA, 23 nt, Artificial Sequence
  targeting domain plus PAM (NGG)
aucagaggccaaacccuuccugg

SEQ ID NO: 964 - DNA, 23 bp, Artificial Sequence
  targeting domain plus PAM (NGG)
ctaacagttgcttttatcacagg

SEQ ID NO: 965 - DNA, 23 bp, Artificial Sequence
  targeting domain plus PAM (NGG)
gggcgtgggtggggtagaagagg

SEQ ID NO: 966 - DNA, 23 bp, Artificial Sequence
  targeting domain plus PAM (NGG)
ctcttagacataacacaccaggg

SEQ ID NO: 967 - DNA, 23 bp, Artificial Sequence
  targeting domain plus PAM (NGG)
atcagaggccaaacccttcctgg

SEQ ID NO: 968 - DNA, 115 bp, Artificial Sequence
  +58 DHS enhancer
caactttgaagctagtctagtgcaagctaacagttgcttttatcacaggctccaggaagggtttggcctctgattagggtgggggcgtgggtggggtagaagaggactggcagac

SEQ ID NO: 969 - DNA, 801 bp, Artificial Sequence
  +58 DHS enhancer region including ~500 bp upstream and ~200 bp downstream
aggtaccttttgtgtgtatgtgctgattgagggcccattgagaatattttgacttttagggaagctccaaactctcaaaccacagggatcacaacacatacgtgtgtctgttatgacgttatatgtaagcatcacaacaggcagagaatgtctgcaccccaccctggaaaacagcctgactgtgccccatgggcaaaccagactagtttatagggggttctactctgaggtactgatggaccttgggtgctattcctgtgataaggaaggcagctagacaggacttgggagttatctgtagtgagatggctgaaaagcgatacagggctggctctatgccccaggtgtgcataagtaagagcagatagctgattccagtgcaaagtccatacaggtaataacataggccagaaaagagatatggcatctactcttagacataacacaccagggtcaatacaactttgaagctagtctagtgcaagctaacagttgcttttatcacaggctccaggaagggtttggcctctgattagggtgggggcgtgggtggggtagaagaggactggcagacctctccatcggtggccgtttgcccaggggggcctctttcggaaggctctcttggtgatggagaattggattttatttctcaatgggaatgaaataatttgtatgccatgccgtgtggactcccaaaattgtaaaggaggtgaagcttcccctgtctgcactctcccctcctcataattgtccatttttcatctgtcgggctgtccacccatccatcacatataggca

SEQ ID NO: 970 - RNA, 100 nt, Artificial Sequence
  Unmodified Sp35 gRNA (OLI7066)
cuugucaaggcuauuggucaguuuuagagcuagaaauagcaaguuaaaauaaggcuaguccguuaucaacuugaaaaaguggcaccgagucggugcuuuu

SEQ ID NO: 971 - RNA, 100 nt, Artificial Sequence; identical to SEQ ID NO: 970
  Sp35 gRNA w/ 5' and 3' PS/OMe (OLI8394)
  misc_feature (1)..(1): Modified to contain 2'-O-methyl
  misc_feature (1)..(2): Linked by phosphorothioate (PS) bond
  misc_feature (2)..(3): Linked by phosphorothioate (PS) bond
  misc_feature (2)..(2): Modified to contain 2'-O-methyl
  misc_feature (3)..(4): Linked by phosphorothioate (PS) bond
  misc_feature (3)..(3): Modified to contain 2'-O-methyl
  misc_feature (97)..(98): Linked by phosphorothioate (PS) bond
  misc_feature (97)..(97): Modified to contain 2'-O-methyl
  misc_feature (98)..(99): Linked by phosphorothioate (PS) bond
  misc_feature (98)..(98): Modified to contain 2'-O-methyl
  misc_feature (99)..(100): Linked by phosphorothioate (PS) bond
  misc_feature (99)..(99): Modified to contain 2'-O-methyl

SEQ ID NO: 972 - DNA, 100 bp, Artificial Sequence
  Unmodified Sp35 gRNA (OLI7066)
cttgtcaaggctattggtcagttttagagctagaaatagcaagttaaaataaggctagtccgttatcaacttgaaaaagtggcaccgagtcggtgctttt

SEQ ID NO: 973 - DNA, 100 bp, Artificial Sequence; identical to SEQ ID NO: 972
  Sp35 gRNA w/ 5' and 3' PS/OMe (OLI8394)
  misc_feature (1)..(1): Modified to contain 2'-O-methyl
  misc_feature (1)..(2): Linked by phosphorothioate (PS) bond
  misc_feature (2)..(2): Modified to contain 2'-O-methyl
  misc_feature (2)..(3): Linked by phosphorothioate (PS) bond
  misc_feature (3)..(3): Modified to contain 2'-O-methyl
  misc_feature (3)..(4): Linked by phosphorothioate (PS) bond
  misc_feature (97)..(97): Modified to contain 2'-O-methyl
  misc_feature (97)..(98): Linked by phosphorothioate (PS) bond
  misc_feature (98)..(98): Modified to contain 2'-O-methyl
  misc_feature (98)..(99): Linked by phosphorothioate (PS) bond
  misc_feature (99)..(99): Modified to contain 2'-O-methyl
  misc_feature (99)..(100): Linked by phosphorothioate (PS) bond

SEQ ID NO: 974 - DNA, 180 bp, Artificial Sequence
  Ptx ssODN 18nt - positive strand (OLI16409)
  misc_feature (1)..(2): Linked by phosphorothioate (PS) bond
  misc_feature (179)..(180): Linked by phosphorothioate (PS) bond
ggtgcttccttttattcttcatccctagccagccgccggcccctggcctcactggatactctaagactattggtcaagtttgccttgtcaaggctggccaacccatgggtggagtttagccagggaccgtttcagacagatatttgcattgagatagtgtggggaaggggcccccaagag

SEQ ID NO: 975 - DNA, 180 bp, Artificial Sequence
  Ptx ssODN 18nt - negative strand (OLI16410)
  misc_feature (1)..(2): Linked by phosphorothioate (PS) bond
  misc_feature (179)..(180): Linked by phosphorothioate (PS) bond
ctcttgggggccccttccccacactatctcaatgcaaatatctgtctgaaacggtccctggctaaactccacccatgggttggccagccttgacaaggcaaacttgaccaatagtcttagagtatccagtgaggccaggggccggcggctggctagggatgaagaataaaaggaagcacc

SEQ ID NO: 976 - DNA, 180 bp, Artificial Sequence
  Ptx ssODN 11nt - negative strand (OLI16411)
  misc_feature (1)..(2): Linked by phosphorothioate (PS) bond
  misc_feature (179)..(180): Linked by phosphorothioate (PS) bond
ggccccttccccacactatctcaatgcaaatatctgtctgaaacggtccctggctaaactccacccatgggttggccagccttgccttgagacaaggcaaacttgaccaatagtcttagagtatccagtgaggccaggggccggcggctggctagggatgaagaataaaaggaagcaccc

SEQ ID NO: 977 - DNA, 180 bp, Artificial Sequence
  Ptx ssODN 13nt - negative strand (OLI16412)
  misc_feature (1)..(2): Linked by phosphorothioate (PS) bond
  misc_feature (179)..(180): Linked by phosphorothioate (PS) bond
ggccccttccccacactatctcaatgcaaatatctgtctgaaacggtccctggctaaactccacccatgggttggccagccttgccttgacaaggcaaacttgaccaatagtcttagagtatccagtgaggccaggggccggcggctggctagggatgaagaataaaaggaagcaccctt

SEQ ID NO: 978 - DNA, 180 bp, Artificial Sequence
  Ptx ssODN 11nt - positive strand (OLI16413)
  misc_feature (1)..(2): Linked by phosphorothioate (PS) bond
  misc_feature (179)..(180): Linked by phosphorothioate (PS) bond
gggtgcttccttttattcttcatccctagccagccgccggcccctggcctcactggatactctaagactattggtcaagtttgccttgtctcaaggcaaggctggccaacccatgggtggagtttagccagggaccgtttcagacagatatttgcattgagatagtgtggggaaggggcc

SEQ ID NO: 979 - DNA, 180 bp, Artificial Sequence
  Ptx ssODN 13nt - positive strand (OLI16414)
  misc_feature (1)..(2): Linked by phosphorothioate (PS) bond
  misc_feature (179)..(180): Linked by phosphorothioate (PS) bond
aagggtgcttccttttattcttcatccctagccagccgccggcccctggcctcactggatactctaagactattggtcaagtttgccttgtcaaggcaaggctggccaacccatgggtggagtttagccagggaccgtttcagacagatatttgcattgagatagtgtggggaaggggcc

SEQ ID NO: 980 - DNA, 180 bp, Artificial Sequence
  Ptx ssODN 117G>A - negative strand (OLI16415)
  misc_feature (1)..(2): Linked by phosphorothioate (PS) bond
  misc_feature (179)..(180): Linked by phosphorothioate (PS) bond
ggccccttccccacactatctcaatgcaaatatctgtctgaaacggtccctggctaaactccacccatgggttggccagccttgccttaaccaatagccttgacaaggcaaacttgaccaatagtcttagagtatccagtgaggccaggggccggcggctggctagggatgaagaataaa

SEQ ID NO: 981 - DNA, 180 bp, Artificial Sequence
  Ptx ssODN 117G>A - positive strand (OLI16416)
  misc_feature (1)..(2): Linked by phosphorothioate (PS) bond
  misc_feature (179)..(180): Linked by phosphorothioate (PS) bond
tttattcttcatccctagccagccgccggcccctggcctcactggatactctaagactattggtcaagtttgccttgtcaaggctattggttaaggcaaggctggccaacccatgggtggagtttagccagggaccgtttcagacagatatttgcattgagatagtgtggggaaggggcc

SEQ ID NO: 982 - DNA, 180 bp, Artificial Sequence
  Ptx ssODN 1nt - negative strand (OLI16417)
  misc_feature (1)..(2): Linked by phosphorothioate (PS) bond
  misc_feature (179)..(180): Linked by phosphorothioate (PS) bond
ggccccttccccacactatctcaatgcaaatatctgtctgaaacggtccctggctaaactccacccatgggttggccagccttgccttgccaatagccttgacaaggcaaacttgaccaatagtcttagagtatccagtgaggccaggggccggcggctggctagggatgaagaataaaa

SEQ ID NO: 983 - DNA, 180 bp, Artificial Sequence
  Ptx ssODN 1nt - positive strand (OLI16418)
  misc_feature (1)..(2): Linked by phosphorothioate (PS) bond
  misc_feature (179)..(180): Linked by phosphorothioate (PS) bond
ttttattcttcatccctagccagccgccggcccctggcctcactggatactctaagactattggtcaagtttgccttgtcaaggctattggcaaggcaaggctggccaacccatgggtggagtttagccagggaccgtttcagacagatatttgcattgagatagtgtggggaaggggcc

SEQ ID NO: 984 - DNA, 120 bp, Artificial Sequence
  Ptx ssODN 4nt 40/80 - negative strand (OLI16419)
  misc_feature (1)..(2): Linked by phosphorothioate (PS) bond
  misc_feature (119)..(120): Linked by phosphorothioate (PS) bond
tggctaaactccacccatgggttggccagccttgccttgatagccttgacaaggcaaacttgaccaatagtcttagagtatccagtgaggccaggggccggcggctggctagggatgaag

SEQ ID NO: 985 - DNA, 100 bp, Artificial Sequence
  Ptx ssODN 4nt 30/70 - negative strand (OLI16420)
  misc_feature (1)..(2): Linked by phosphorothioate (PS) bond
  misc_feature (99)..(100): Linked by phosphorothioate (PS) bond
ccacccatgggttggccagccttgccttgatagccttgacaaggcaaacttgaccaatagtcttagagtatccagtgaggccaggggccggcggctggct

SEQ ID NO: 986 - DNA, 100 bp, Artificial Sequence
  Ptx ssODN 4nt - negative strand (OLI16421)
  misc_feature (1)..(2): Linked by phosphorothioate (PS) bond
  misc_feature (99)..(100): Linked by phosphorothioate (PS) bond
aaacggtccctggctaaactccacccatgggttggccagccttgccttgatagccttgacaaggcaaacttgaccaatagtcttagagtatccagtgagg

SEQ ID NO: 987 - DNA, 120 bp, Artificial Sequence
  Ptx ssODN 4nt - negative strand (OLI16422)
  misc_feature (1)..(2): Linked by phosphorothioate (PS) bond
  misc_feature (119)..(120): Linked by phosphorothioate (PS) bond
tatctgtctgaaacggtccctggctaaactccacccatgggttggccagccttgccttgatagccttgacaaggcaaacttgaccaatagtcttagagtatccagtgaggccaggggccg

SEQ ID NO: 988 - DNA, 140 bp, Artificial Sequence
  Ptx ssODN 4nt - negative strand (OLI16423)
  misc_feature (1)..(2): Linked by phosphorothioate (PS) bond
  misc_feature (139)..(140): Linked by phosphorothioate (PS) bond
tcaatgcaaatatctgtctgaaacggtccctggctaaactccacccatgggttggccagccttgccttgatagccttgacaaggcaaacttgaccaatagtcttagagtatccagtgaggccaggggccggcggctggct

SEQ ID NO: 989 - DNA, 180 bp, Artificial Sequence
  Ptx ssODN 4nt - negative strand (OLI16424)
  misc_feature (1)..(2): Linked by phosphorothioate (PS) bond
  misc_feature (179)..(180): Linked by phosphorothioate (PS) bond
ggccccttccccacactatctcaatgcaaatatctgtctgaaacggtccctggctaaactccacccatgggttggccagccttgccttgatagccttgacaaggcaaacttgaccaatagtcttagagtatccagtgaggccaggggccggcggctggctagggatgaagaataaaagga

SEQ ID NO: 990 - DNA, 120 bp, Artificial Sequence
  Ptx ssODN 4nt 40/80 - positive strand (OLI16425)
  misc_feature (1)..(2): Linked by phosphorothioate (PS) bond
  misc_feature (119)..(120): Linked by phosphorothioate (PS) bond
tactctaagactattggtcaagtttgccttgtcaaggctatcaaggcaaggctggccaacccatgggtggagtttagccagggaccgtttcagacagatatttgcattgagatagtgtgg

SEQ ID NO: 991 - DNA, 100 bp, Artificial Sequence
  Ptx ssODN 4nt 30/70 - positive strand (OLI16426)
  misc_feature (1)..(2): Linked by phosphorothioate (PS) bond
  misc_feature (99)..(100): Linked by phosphorothioate (PS) bond
ctattggtcaagtttgccttgtcaaggctatcaaggcaaggctggccaacccatgggtggagtttagccagggaccgtttcagacagatatttgcattga

SEQ ID NO: 992 - DNA, 100 bp, Artificial Sequence
  Ptx ssODN 4nt - positive strand (OLI16427)
  misc_feature (1)..(2): Linked by phosphorothioate (PS) bond
  misc_feature (99)..(100): Linked by phosphorothioate (PS) bond
cctcactggatactctaagactattggtcaagtttgccttgtcaaggctatcaaggcaaggctggccaacccatgggtggagtttagccagggaccgttt

SEQ ID NO: 993 - DNA, 120 bp, Artificial Sequence
  Ptx ssODN 4nt - positive strand (OLI16428)
  misc_feature (1)..(2): Linked by phosphorothioate (PS) bond
  misc_feature (119)..(120): Linked by phosphorothioate (PS) bond
cggcccctggcctcactggatactctaagactattggtcaagtttgccttgtcaaggctatcaaggcaaggctggccaacccatgggtggagtttagccagggaccgtttcagacagata

SEQ ID NO: 994 - DNA, 140 bp, Artificial Sequence
  Ptx ssODN 4nt - positive strand (OLI16429)
  misc_feature (1)..(2): Linked by phosphorothioate (PS) bond
  misc_feature (139)..(140): Linked by phosphorothioate (PS) bond
agccagccgccggcccctggcctcactggatactctaagactattggtcaagtttgccttgtcaaggctatcaaggcaaggctggccaacccatgggtggagtttagccagggaccgtttcagacagatatttgcattga

SEQ ID NO: 995 - DNA, 180 bp, Artificial Sequence
  Ptx ssODN 4nt - positive strand (OLI16430)
  misc_feature (1)..(2): Linked by phosphorothioate (PS) bond
  misc_feature (179)..(180): Linked by phosphorothioate (PS) bond
tccttttattcttcatccctagccagccgccggcccctggcctcactggatactctaagactattggtcaagtttgccttgtcaaggctatcaaggcaaggctggccaacccatgggtggagtttagccagggaccgtttcagacagatatttgcattgagatagtgtggggaaggggcc

SEQ ID NO: 996 - RNA, 100 nt, Artificial Sequence
  Sp37 gRNA (OLI17075)
cuugaccaauagccuugacaguuuuagagcuagaaauagcaaguuaaaauaaggcuaguccguuaucaacuugaaaaaguggcaccgagucggugcuuuu

SEQ ID NO: 997 - RNA, 100 nt, Artificial Sequence
  SpA gRNA (OLI17074)
ggcaaggcuggccaacccauguuuuagagcuagaaauagcaaguuaaaauaaggcuaguccguuaucaacuugaaaaaguggcaccgagucggugcuuuu

SEQ ID NO: 998 - DNA, 100 bp, Artificial Sequence
  Sp37 gRNA (OLI17075)
cttgaccaatagccttgacagttttagagctagaaatagcaagttaaaataaggctagtccgttatcaacttgaaaaagtggcaccgagtcggtgctttt

SEQ ID NO: 999 - DNA, 100 bp, Artificial Sequence
  SpA gRNA (OLI17074)
ggcaaggctggccaacccatgttttagagctagaaatagcaagttaaaataaggctagtccgttatcaacttgaaaaagtggcaccgagtcggtgctttt

SEQ ID NO: 1000 - protein, 1332 aa, Artificial Sequence
  His-AsCpf1-nNLS
MKHHHHHHMTQFEGFTNLYQVSKTLRFELIPQGKTLKHIQEQGFIEEDKARNDHYKELKPIIDRIYKTYADQCLQLVQLDWENLSAAIDSYRKEKTEETRNALIEEQATYRNAIHDYFIGRTDNLTDAINKRHAEIYKGLFKAELFNGKVLKQLGTVTTTEHENALLRSFDKFTTYFSGFYENRKNVFSAEDISTAIPHRIVQDNFPKFKENCHIFTRLITAVPSLREHFENVKKAIGIFVSTSIEEVFSFPFYNQLLTQTQIDLYNQLLGGISREAGTEKIKGLNEVLNLAIQKNDETAHIIASLPHRFIPLFKQILSDRNTLSFILEEFKSDEEVIQSFCKYKTLLRNENVLETAEALFNELNSIDLTHIFISHKKLETISSALCDHWDTLRNALYERRISELTGKITKSAKEKVQRSLKHEDINLQEIISAAGKELSEAFKQKTSEILSHAHAALDQPLPTTLKKQEEKEILKSQLDSLLGLYHLLDWFAVDESNEVDPEFSARLTGIKLEMEPSLSFYNKARNYATKKPYSVEKFKLNFQMPTLASGWDVNKEKNNGAILFVKNGLYYLGIMPKQKGRYKALSFEPTEKTSEGFDKMYYDYFPDAAKMIPKCSTQLKAVTAHFQTHTTPILLSNNFIEPLEITKEIYDLNNPEKEPKKFQTAYAKKTGDQKGYREALCKWIDFTRDFLSKYTKTTSIDLSSLRPSSQYKDLGEYYAELNPLLYHISFQRIAEKEIMDAVETGKLYLFQIYNKDFAKGHHGKPNLHTLYWTGLFSPENLAKTSIKLNGQAELFYRPKSRMKRMAHRLGEKMLNKKLKDQKTPIPDTLYQELYDYVNHRLSHDLSDEARALLPNVITKEVSHEIIKDRRFTSDKFFFHVPITLNYQAANSPSKFNQRVNAYLKEHPETPIIGIDRGERNLIYITVIDSTGKILEQRSLNTIQQFDYQKKLDNREKERVAARQAWSVVGTIKDLKQGYLSQVIHEIVDLMIHYQAVVVLENLNFGFKSKRTGIAEKAVYQQFEKMLIDKLNCLVLKDYPAEKVGGVLNPYQLTDQFTSFAKMGTQSGFLFYVPAPYTSKIDPLTGFVDPFVWKTIKNHESRKHFLEGFDFLHYDVKTGDFILHFKMNRNLSFQRGLPGFMPAWDIVFEKNETQFDAKGTPFIAGKRIVPVIENHRFTGRYRDLYPANELIALLEEKGIVFRDGSNILPKLLENDDSHAIDTMVALIRSVLQMRNSNAATGEDYINSPVRDLNGVCFDSRFQNPEWPMDADANGAYHIALKGQLLLNHLKESKDLKLQNGISNQDWLAYIQELRNKRPAATKKAGQAKKKKG

SEQ ID NO: 1001 - protein, 1333 aa, Artificial Sequence
  His-AsCpf1-sNLS-sNLS
MKHHHHHHMTQFEGFTNLYQVSKTLRFELIPQGKTLKHIQEQGFIEEDKARNDHYKELKPIIDRIYKTYADQCLQLVQLDWENLSAAIDSYRKEKTEETRNALIEEQATYRNAIHDYFIGRTDNLTDAINKRHAEIYKGLFKAELFNGKVLKQLGTVTTTEHENALLRSFDKFTTYFSGFYENRKNVFSAEDISTAIPHRIVQDNFPKFKENCHIFTRLITAVPSLREHFENVKKAIGIFVSTSIEEVFSFPFYNQLLTQTQIDLYNQLLGGISREAGTEKIKGLNEVLNLAIQKNDETAHIIASLPHRFIPLFKQILSDRNTLSFILEEFKSDEEVIQSFCKYKTLLRNENVLETAEALFNELNSIDLTHIFISHKKLETISSALCDHWDTLRNALYERRISELTGKITKSAKEKVQRSLKHEDINLQEIISAAGKELSEAFKQKTSEILSHAHAALDQPLPTTLKKQEEKEILKSQLDSLLGLYHLLDWFAVDESNEVDPEFSARLTGIKLEMEPSLSFYNKARNYATKKPYSVEKFKLNFQMPTLASGWDVNKEKNNGAILFVKNGLYYLGIMPKQKGRYKALSFEPTEKTSEGFDKMYYDYFPDAAKMIPKCSTQLKAVTAHFQTHTTPILLSNNFIEPLEITKEIYDLNNPEKEPKKFQTAYAKKTGDQKGYREALCKWIDFTRDFLSKYTKTTSIDLSSLRPSSQYKDLGEYYAELNPLLYHISFQRIAEKEIMDAVETGKLYLFQIYNKDFAKGHHGKPNLHTLYWTGLFSPENLAKTSIKLNGQAELFYRPKSRMKRMAHRLGEKMLNKKLKDQKTPIPDTLYQELYDYVNHRLSHDLSDEARALLPNVITKEVSHEIIKDRRFTSDKFFFHVPITLNYQAANSPSKFNQRVNAYLKEHPETPIIGIDRGERNLIYITVIDSTGKILEQRSLNTIQQFDYQKKLDNREKERVAARQAWSVVGTIKDLKQGYLSQVIHEIVDLMIHYQAVVVLENLNFGFKSKRTGIAEKAVYQQFEKMLIDKLNCLVLKDYPAEKVGGVLNPYQLTDQFTSFAKMGTQSGFLFYVPAPYTSKIDPLTGFVDPFVWKTIKNHESRKHFLEGFDFLHYDVKTGDFILHFKMNRNLSFQRGLPGFMPAWDIVFEKNETQFDAKGTPFIAGKRIVPVIENHRFTGRYRDLYPANELIALLEEKGIVFRDGSNILPKLLENDDSHAIDTMVALIRSVLQMRNSNAATGEDYINSPVRDLNGVCFDSRFQNPEWPMDADANGAYHIALKGQLLLNHLKESKDLKLQNGISNQDWLAYIQELRNGSPKKKRKVGSPKKKRKV

SEQ ID NO: 1002 - RNA, 20 nt, Artificial Sequence
  HBG1-1 gRNA (OLI13620) targeting domain
ccuugucaaggcuauugguc

SEQ ID NO: 1003 - DNA, 20 bp, Artificial Sequence
  HBG1-1 gRNA (OLI13620) targeting domain
ccttgtcaaggctattggtc

SEQ ID NO: 1004 - RNA, 24 nt, Artificial Sequence
  HBG1-1 gRNA (OLI13620) targeting domain plus PAM
uuugccuugucaaggcuauugguc

SEQ ID NO: 1005 - DNA, 24 bp, Artificial Sequence
  HBG1-1 gRNA (OLI13620) targeting domain plus PAM
tttgccttgtcaaggctattggtc

SEQ ID NO: 1006 - protein, 16 aa, Artificial Sequence
  Nucleoplasmin NLS
KRPAATKKAGQAKKKK

SEQ ID NO: 1007 - protein, 7 aa, Artificial Sequence
  Simian Virus 40 NLS
PKKKRKV

SEQ ID NO: 1008 - protein, 1324 aa, Artificial Sequence
  His-AsCpf1-sNLS
  MISC_FEATURE (3)..(8): His tag
  MISC_FEATURE (1318)..(1324): SV40 NLS
MKHHHHHHMTQFEGFTNLYQVSKTLRFELIPQGKTLKHIQEQGFIEEDKARNDHYKELKPIIDRIYKTYADQCLQLVQLDWENLSAAIDSYRKEKTEETRNALIEEQATYRNAIHDYFIGRTDNLTDAINKRHAEIYKGLFKAELFNGKVLKQLGTVTTTEHENALLRSFDKFTTYFSGFYENRKNVFSAEDISTAIPHRIVQDNFPKFKENCHIFTRLITAVPSLREHFENVKKAIGIFVSTSIEEVFSFPFYNQLLTQTQIDLYNQLLGGISREAGTEKIKGLNEVLNLAIQKNDETAHIIASLPHRFIPLFKQILSDRNTLSFILEEFKSDEEVIQSFCKYKTLLRNENVLETAEALFNELNSIDLTHIFISHKKLETISSALCDHWDTLRNALYERRISELTGKITKSAKEKVQRSLKHEDINLQEIISAAGKELSEAFKQKTSEILSHAHAALDQPLPTTLKKQEEKEILKSQLDSLLGLYHLLDWFAVDESNEVDPEFSARLTGIKLEMEPSLSFYNKARNYATKKPYSVEKFKLNFQMPTLASGWDVNKEKNNGAILFVKNGLYYLGIMPKQKGRYKALSFEPTEKTSEGFDKMYYDYFPDAAKMIPKCSTQLKAVTAHFQTHTTPILLSNNFIEPLEITKEIYDLNNPEKEPKKFQTAYAKKTGDQKGYREALCKWIDFTRDFLSKYTKTTSIDLSSLRPSSQYKDLGEYYAELNPLLYHISFQRIAEKEIMDAVETGKLYLFQIYNKDFAKGHHGKPNLHTLYWTGLFSPENLAKTSIKLNGQAELFYRPKSRMKRMAHRLGEKMLNKKLKDQKTPIPDTLYQELYDYVNHRLSHDLSDEARALLPNVITKEVSHEIIKDRRFTSDKFFFHVPITLNYQAANSPSKFNQRVNAYLKEHPETPIIGIDRGERNLIYITVIDSTGKILEQRSLNTIQQFDYQKKLDNREKERVAARQAWSVVGTIKDLKQGYLSQVIHEIVDLMIHYQAVVVLENLNFGFKSKRTGIAEKAVYQQFEKMLIDKLNCLVLKDYPAEKVGGVLNPYQLTDQFTSFAKMGTQSGFLFYVPAPYTSKIDPLTGFVDPFVWKTIKNHESRKHFLEGFDFLHYDVKTGDFILHFKMNRNLSFQRGLPGFMPAWDIVFEKNETQFDAKGTPFIAGKRIVPVIENHRFTGRYRDLYPANELIALLEEKGIVFRDGSNILPKLLENDDSHAIDTMVALIRSVLQMRNSNAATGEDYINSPVRDLNGVCFDSRFQNPEWPMDADANGAYHIALKGQLLLNHLKESKDLKLQNGISNQDWLAYIQELRNGSPKKKRKV

SEQ ID NO: 1009 - protein, 1326 aa, Artificial Sequence
  His-sNLS-AsCpf1
  MISC_FEATURE (3)..(8): His tag
  MISC_FEATURE (11)..(17): SV40 NLS
MKHHHHHHGSPKKKRKVGSMTQFEGFTNLYQVSKTLRFELIPQGKTLKHIQEQGFIEEDKARNDHYKELKPIIDRIYKTYADQCLQLVQLDWENLSAAIDSYRKEKTEETRNALIEEQATYRNAIHDYFIGRTDNLTDAINKRHAEIYKGLFKAELFNGKVLKQLGTVTTTEHENALLRSFDKFTTYFSGFYENRKNVFSAEDISTAIPHRIVQDNFPKFKENCHIFTRLITAVPSLREHFENVKKAIGIFVSTSIEEVFSFPFYNQLLTQTQIDLYNQLLGGISREAGTEKIKGLNEVLNLAIQKNDETAHIIASLPHRFIPLFKQILSDRNTLSFILEEFKSDEEVIQSFCKYKTLLRNENVLETAEALFNELNSIDLTHIFISHKKLETISSALCDHWDTLRNALYERRISELTGKITKSAKEKVQRSLKHEDINLQEIISAAGKELSEAFKQKTSEILSHAHAALDQPLPTTLKKQEEKEILKSQLDSLLGLYHLLDWFAVDESNEVDPEFSARLTGIKLEMEPSLSFYNKARNYATKKPYSVEKFKLNFQMPTLASGWDVNKEKNNGAILFVKNGLYYLGIMPKQKGRYKALSFEPTEKTSEGFDKMYYDYFPDAAKMIPKCSTQLKAVTAHFQTHTTPILLSNNFIEPLEITKEIYDLNNPEKEPKKFQTAYAKKTGDQKGYREALCKWIDFTRDFLSKYTKTTSIDLSSLRPSSQYKDLGEYYAELNPLLYHISFQRIAEKEIMDAVETGKLYLFQIYNKDFAKGHHGKPNLHTLYWTGLFSPENLAKTSIKLNGQAELFYRPKSRMKRMAHRLGEKMLNKKLKDQKTPIPDTLYQELYDYVNHRLSHDLSDEARALLPNVITKEVSHEIIKDRRFTSDKFFFHVPITLNYQAANSPSKFNQRVNAYLKEHPETPIIGIDRGERNLIYITVIDSTGKILEQRSLNTIQQFDYQKKLDNREKERVAARQAWSVVGTIKDLKQGYLSQVIHEIVDLMIHYQAVVVLENLNFGFKSKRTGIAEKAVYQQFEKMLIDKLNCLVLKDYPAEKVGGVLNPYQLTDQFTSFAKMGTQSGFLFYVPAPYTSKIDPLTGFVDPFVWKTIKNHESRKHFLEGFDFLHYDVKTGDFILHFKMNRNLSFQRGLPGFMPAWDIVFEKNETQFDAKGTPFIAGKRIVPVIENHRFTGRYRDLYPANELIALLEEKGIVFRDGSNILPKLLENDDSHAIDTMVALIRSVLQMRNSNAATGEDYINSPVRDLNGVCFDSRFQNPEWPMDADANGAYHIALKGQLLLNHLKESKDLKLQNGISNQDWLAYIQELRN

SEQ ID NO: 1010 - protein, 1333 aa, Artificial Sequence
  His-sNLS-sNLS-AsCpf1
  MISC_FEATURE (3)..(8): His tag
  MISC_FEATURE (11)..(17): SV40 NLS
  MISC_FEATURE (20)..(26): SV40 NLS
MKHHHHHHGSPKKKRKVGSPKKKRKVMTQFEGFTNLYQVSKTLRFELIPQGKTLKHIQEQGFIEEDKARNDHYKELKPIIDRIYKTYADQCLQLVQLDWENLSAAIDSYRKEKTEETRNALIEEQATYRNAIHDYFIGRTDNLTDAINKRHAEIYKGLFKAELFNGKVLKQLGTVTTTEHENALLRSFDKFTTYFSGFYENRKNVFSAEDISTAIPHRIVQDNFPKFKENCHIFTRLITAVPSLREHFENVKKAIGIFVSTSIEEVFSFPFYNQLLTQTQIDLYNQLLGGISREAGTEKIKGLNEVLNLAIQKNDETAHIIASLPHRFIPLFKQILSDRNTLSFILEEFKSDEEVIQSFCKYKTLLRNENVLETAEALFNELNSIDLTHIFISHKKLETISSALCDHWDTLRNALYERRISELTGKITKSAKEKVQRSLKHEDINLQEIISAAGKELSEAFKQKTSEILSHAHAALDQPLPTTLKKQEEKEILKSQLDSLLGLYHLLDWFAVDESNEVDPEFSARLTGIKLEMEPSLSFYNKARNYATKKPYSVEKFKLNFQMPTLASGWDVNKEKNNGAILFVKNGLYYLGIMPKQKGRYKALSFEPTEKTSEGFDKMYYDYFPDAAKMIPKCSTQLKAVTAHFQTHTTPILLSNNFIEPLEITKEIYDLNNPEKEPKKFQTAYAKKTGDQKGYREALCKWIDFTRDFLSKYTKTTSIDLSSLRPSSQYKDLGEYYAELNPLLYHISFQRIAEKEIMDAVETGKLYLFQIYNKDFAKGHHGKPNLHTLYWTGLFSPENLAKTSIKLNGQAELFYRPKSRMKRMAHRLGEKMLNKKLKDQKTPIPDTLYQELYDYVNHRLSHDLSDEARALLPNVITKEVSHEIIKDRRFTSDKFFFHVPITLNYQAANSPSKFNQRVNAYLKEHPETPIIGIDRGERNLIYITVIDSTGKILEQRSLNTIQQFDYQKKLDNREKERVAARQAWSVVGTIKDLKQGYLSQVIHEIVDLMIHYQAVVVLENLNFGFKSKRTGIAEKAVYQQFEKMLIDKLNCLVLKDYPAEKVGGVLNPYQLTDQFTSFAKMGTQSGFLFYVPAPYTSKIDPLTGFVDPFVWKTIKNHESRKHFLEGFDFLHYDVKTGDFILHFKMNRNLSFQRGLPGFMPAWDIVFEKNETQFDAKGTPFIAGKRIVPVIENHRFTGRYRDLYPANELIALLEEKGIVFRDGSNILPKLLENDDSHAIDTMVALIRSVLQMRNSNAATGEDYINSPVRDLNGVCFDSRFQNPEWPMDADANGAYHIALKGQLLLNHLKESKDLKLQNGISNQDWLAYIQELRN

SEQ ID NO: 1011 - protein, 1327 aa, Artificial Sequence
  sNLS-sNLS-AsCpf1
  MISC_FEATURE (5)..(11): SV40 NLS
  MISC_FEATURE (14)..(20): SV40 NLS
MKGSPKKKRKVGSPKKKRKVMTQFEGFTNLYQVSKTLRFELIPQGKTLKHIQEQGFIEEDKARNDHYKELKPIIDRIYKTYADQCLQLVQLDWENLSAAIDSYRKEKTEETRNALIEEQATYRNAIHDYFIGRTDNLTDAINKRHAEIYKGLFKAELFNGKVLKQLGTVTTTEHENALLRSFDKFTTYFSGFYENRKNVFSAEDISTAIPHRIVQDNFPKFKENCHIFTRLITAVPSLREHFENVKKAIGIFVSTSIEEVFSFPFYNQLLTQTQIDLYNQLLGGISREAGTEKIKGLNEVLNLAIQKNDETAHIIASLPHRFIPLFKQILSDRNTLSFILEEFKSDEEVIQSFCKYKTLLRNENVLETAEALFNELNSIDLTHIFISHKKLETISSALCDHWDTLRNALYERRISELTGKITKSAKEKVQRSLKHEDINLQEIISAAGKELSEAFKQKTSEILSHAHAALDQPLPTTLKKQEEKEILKSQLDSLLGLYHLLDWFAVDESNEVDPEFSARLTGIKLEMEPSLSFYNKARNYATKKPYSVEKFKLNFQMPTLASGWDVNKEKNNGAILFVKNGLYYLGIMPKQKGRYKALSFEPTEKTSEGFDKMYYDYFPDAAKMIPKCSTQLKAVTAHFQTHTTPILLSNNFIEPLEITKEIYDLNNPEKEPKKFQTAYAKKTGDQKGYREALCKWIDFTRDFLSKYTKTTSIDLSSLRPSSQYKDLGEYYAELNPLLYHISFQRIAEKEIMDAVETGKLYLFQIYNKDFAKGHHGKPNLHTLYWTGLFSPENLAKTSIKLNGQAELFYRPKSRMKRMAHRLGEKMLNKKLKDQKTPIPDTLYQELYDYVNHRLSHDLSDEARALLPNVITKEVSHEIIKDRRFTSDKFFFHVPITLNYQAANSPSKFNQRVNAYLKEHPETPIIGIDRGERNLIYITVIDSTGKILEQRSLNTIQQFDYQKKLDNREKERVAARQAWSVVGTIKDLKQGYLSQVIHEIVDLMIHYQAVVVLENLNFGFKSKRTGIAEKAVYQQFEKMLIDKLNCLVLKDYPAEKVGGVLNPYQLTDQFTSFAKMGTQSGFLFYVPAPYTSKIDPLTGFVDPFVWKTIKNHESRKHFLEGFDFLHYDVKTGDFILHFKMNRNLSFQRGLPGFMPAWDIVFEKNETQFDAKGTPFIAGKRIVPVIENHRFTGRYRDLYPANELIALLEEKGIVFRDGSNILPKLLENDDSHAIDTMVALIRSVLQMRNSNAATGEDYINSPVRDLNGVCFDSRFQNPEWPMDADANGAYHIALKGQLLLNHLKESKDLKLQNGISNQDWLAYIQELRN

SEQ ID NO: 1012 - protein, 1332 aa, Artificial Sequence
  His-sNLS-AsCpf1-sNLS
  MISC_FEATURE (3)..(8): His tag
  MISC_FEATURE (10)..(16): SV40 NLS
  MISC_FEATURE (1325)..(1331): SV40 NLS
MKHHHHHHMPKKKRKVMTQFEGFTNLYQVSKTLRFELIPQGKTLKHIQEQGFIEEDKARNDHYKELKPIIDRIYKTYADQCLQLVQLDWENLSAAIDSYRKEKTEETRNALIEEQATYRNAIHDYFIGRTDNLTDAINKRHAEIYKGLFKAELFNGKVLKQLGTVTTTEHENALLRSFDKFTTYFSGFYENRKNVFSAEDISTAIPHRIVQDNFPKFKENCHIFTRLITAVPSLREHFENVKKAIGIFVSTSIEEVFSFPFYNQLLTQTQIDLYNQLLGGISREAGTEKIKGLNEVLNLAIQKNDETAHIIASLPHRFIPLFKQILSDRNTLSFILEEFKSDEEVIQSFCKYKTLLRNENVLETAEALFNELNSIDLTHIFISHKKLETISSALCDHWDTLRNALYERRISELTGKITKSAKEKVQRSLKHEDINLQEIISAAGKELSEAFKQKTSEILSHAHAALDQPLPTTLKKQEEKEILKSQLDSLLGLYHLLDWFAVDESNEVDPEFSARLTGIKLEMEPSLSFYNKARNYATKKPYSVEKFKLNFQMPTLASGWDVNKEKNNGAILFVKNGLYYLGIMPKQKGRYKALSFEPTEKTSEGFDKMYYDYFPDAAKMIPKCSTQLKAVTAHFQTHTTPILLSNNFIEPLEITKEIYDLNNPEKEPKKFQTAYAKKTGDQKGYREALCKWIDFTRDFLSKYTKTTSIDLSSLRPSSQYKDLGEYYAELNPLLYHISFQRIAEKEIMDAVETGKLYLFQIYNKDFAKGHHGKPNLHTLYWTGLFSPENLAKTSIKLNGQAELFYRPKSRMKRMAHRLGEKMLNKKLKDQKTPIPDTLYQELYDYVNHRLSHDLSDEARALLPNVITKEVSHEIIKDRRFTSDKFFFHVPITLNYQAANSPSKFNQRVNAYLKEHPETPIIGIDRGERNLIYITVIDSTGKILEQRSLNTIQQFDYQKKLDNREKERVAARQAWSVVGTIKDLKQGYLSQVIHEIVDLMIHYQAVVVLENLNFGFKSKRTGIAEKAVYQQFEKMLIDKLNCLVLKDYPAEKVGGVLNPYQLTDQFTSFAKMGTQSGFLFYVPAPYTSKIDPLTGFVDPFVWKTIKNHESRKHFLEGFDFLHYDVKTGDFILHFKMNRNLSFQRGLPGFMPAWDIVFEKNETQFDAKGTPFIAGKRIVPVIENHRFTGRYRDLYPANELIALLEEKGIVFRDGSNILPKLLENDDSHAIDTMVALIRSVLQMRNSNAATGEDYINSPVRDLNGVCFDSRFQNPEWPMDADANGAYHIALKGQLLLNHLKESKDLKLQNGISNQDWLAYIQELRNGPKKKRKVG

SEQ ID NO: 1013 - protein, 1352 aa, Artificial Sequence
  His-sNLS-sNLS-AsCpf1-sNLS-sNLS
  MISC_FEATURE (3)..(8): His tag
  MISC_FEATURE (11)..(17): SV40 NLS
  MISC_FEATURE (20)..(26): SV40 NLS
  MISC_FEATURE (1337)..(1343): SV40 NLS
  MISC_FEATURE (1346)..(1352): SV40 NLS
MGHHHHHHGSPKKKRKVGSPKKKRKVGSTQFEGFTNLYQVSKTLRFELIPQGKTLKHIQEQGFIEEDKARNDHYKELKPIIDRIYKTYADQCLQLVQLDWENLSAAIDSYRKEKTEETRNALIEEQATYRNAIHDYFIGRTDNLTDAINKRHAEIYKGLFKAELFNGKVLKQLGTVTTTEHENALLRSFDKFTTYFSGFYENRKNVFSAEDISTAIPHRIVQDNFPKFKENCHIFTRLITAVPSLREHFENVKKAIGIFVSTSIEEVFSFPFYNQLLTQTQIDLYNQLLGGISREAGTEKIKGLNEVLNLAIQKNDETAHIIASLPHRFIPLFKQILSDRNTLSFILEEFKSDEEVIQSFCKYKTLLRNENVLETAEALFNELNSIDLTHIFISHKKLETISSALCDHWDTLRNALYERRISELTGKITKSAKEKVQRSLKHEDINLQEIISAAGKELSEAFKQKTSEILSHAHAALDQPLPTTLKKQEEKEILKSQLDSLLGLYHLLDWFAVDESNEVDPEFSARLTGIKLEMEPSLSFYNKARNYATKKPYSVEKFKLNFQMPTLASGWDVNKEKNNGAILFVKNGLYYLGIMPKQKGRYKALSFEPTEKTSEGFDKMYYDYFPDAAKMIPKCSTQLKAVTAHFQTHTTPILLSNNFIEPLEITKEIYDLNNPEKEPKKFQTAYAKKTGDQKGYREALCKWIDFTRDFLSKYTKTTSIDLSSLRPSSQYKDLGEYYAELNPLLYHISFQRIAEKEIMDAVETGKLYLFQIYNKDFAKGHHGKPNLHTLYWTGLFSPENLAKTSIKLNGQAELFYRPKSRMKRMAARLGEKMLNKKLKDQKTPIPDTLYQELYDYVNHRLSHDLSDEARALLPNVITKEVSHEIIKDRRFTSDKFFFHVPITLNYQAANSPSKFNQRVNAYLKEHPETPIIGIDRGERNLIYITVIDSTGKILEQRSLNTIQQFDYQKKLDNREKERVAARQAWSVVGTIKDLKQGYLSQVIHEIVDLMIHYQAVVVLENLNFGFKSKRTGIAEKAVYQQFEKMLIDKLNCLVLKDYPAEKVGGVLNPYQLTDQFTSFAKMGTQSGFLFYVPAPYTSKIDPLTGFVDPFVWKTIKNHESRKHFLEGFDFLHYDVKTGDFILHFKMNRNLSFQRGLPGFMPAWDIVFEKNETQFDAKGTPFIAGKRIVPVIENHRFTGRYRDLYPANELIALLEEKGIVFRDGSNILPKLLENDDSHAIDTMVALIRSVLQMRNSNAATGEDYINSPVRDLNGVCFDSRFQNPEWPMDADANGAYHIALKGQLLLNHLKESKDLKLQNGISNQDWLAYIQELRNGSPKKKRKVGSPKKKRKV

SEQ ID NO: 1014 - protein, 1332 aa, Artificial Sequence
  His-AsCpf1-nNLS Cys-less
  MISC_FEATURE (3)..(8): His tag
  MISC_FEATURE (1316)..(1331): Nucleoplasmin NLS
MKHHHHHHMTQFEGFTNLYQVSKTLRFELIPQGKTLKHIQEQGFIEEDKARNDHYKELKPIIDRIYKTYADQSLQLVQLDWENLSAAIDSYRKEKTEETRNALIEEQATYRNAIHDYFIGRTDNLTDAINKRHAEIYKGLFKAELFNGKVLKQLGTVTTTEHENALLRSFDKFTTYFSGFYENRKNVFSAEDISTAIPHRIVQDNFPKFKENSHIFTRLITAVPSLREHFENVKKAIGIFVSTSIEEVFSFPFYNQLLTQTQIDLYNQLLGGISREAGTEKIKGLNEVLNLAIQKNDETAHIIASLPHRFIPLFKQILSDRNTLSFILEEFKSDEEVIQSFSKYKTLLRNENVLETAEALFNELNSIDLTHIFISHKKLETISSALSDHWDTLRNALYERRISELTGKITKSAKEKVQRSLKHEDINLQEIISAAGKELSEAFKQKTSEILSHAHAALDQPLPTTLKKQEEKEILKSQLDSLLGLYHLLDWFAVDESNEVDPEFSARLTGIKLEMEPSLSFYNKARNYATKKPYSVEKFKLNFQMPTLASGWDVNKEKNNGAILFVKNGLYYLGIMPKQKGRYKALSFEPTEKTSEGFDKMYYDYFPDAAKMIPKSSTQLKAVTAHFQTHTTPILLSNNFIEPLEITKEIYDLNNPEKEPKKFQTAYAKKTGDQKGYREALSKWIDFTRDFLSKYTKTTSIDLSSLRPSSQYKDLGEYYAELNPLLYHISFQRIAEKEIMDAVETGKLYLFQIYNKDFAKGHHGKPNLHTLYWTGLFSPENLAKTSIKLNGQAELFYRPKSRMKRMAHRLGEKMLNKKLKDQKTPIPDTLYQELYDYVNHRLSHDLSDEARALLPNVITKEVSHEIIKDRRFTSDKFFFHVPITLNYQAANSPSKFNQRVNAYLKEHPETPIIGIDRGERNLIYITVIDSTGKILEQRSLNTIQQFDYQKKLDNREKERVAARQAWSVVGTIKDLKQGYLSQVIHEIVDLMIHYQAVVVLENLNFGFKSKRTGIAEKAVYQQFEKMLIDKLNSLVLKDYPAEKVGGVLNPYQLTDQFTSFAKMGTQSGFLFYVPAPYTSKIDPLTGFVDPFVWKTIKNHESRKHFLEGFDFLHYDVKTGDFILHFKMNRNLSFQRGLPGFMPAWDIVFEKNETQFDAKGTPFIAGKRIVPVIENHRFTGRYRDLYPANELIALLEEKGIVFRDGSNILPKLLENDDSHAIDTMVALIRSVLQMRNSNAATGEDYINSPVRDLNGVSFDSRFQNPEWPMDADANGAYHIALKGQLLLNHLKESKDLKLQNGISNQDWLAYIQELRNKRPAATKKAGQAKKKKG

SEQ ID NO: 1015 - protein, 1332 aa, Artificial Sequence
  His-AsCpf1-nNLS Cys-low
  MISC_FEATURE (3)..(8): His tag
  MISC_FEATURE (1316)..(1331): Nucleoplasmin NLS
MKHHHHHHMTQFEGFTNLYQVSKTLRFELIPQGKTLKHIQEQGFIEEDKARNDHYKELKPIIDRIYKTYADQCLQLVQLDWENLSAAIDSYRKEKTEETRNALIEEQATYRNAIHDYFIGRTDNLTDAINKRHAEIYKGLFKAELFNGKVLKQLGTVTTTEHENALLRSFDKFTTYFSGFYENRKNVFSAEDISTAIPHRIVQDNFPKFKENCHIFTRLITAVPSLREHFENVKKAIGIFVSTSIEEVFSFPFYNQLLTQTQIDLYNQLLGGISREAGTEKIKGLNEVLNLAIQKNDETAHIIASLPHRFIPLFKQILSDRNTLSFILEEFKSDEEVIQSFSKYKTLLRNENVLETAEALFNELNSIDLTHIFISHKKLETISSALSDHWDTLRNALYERRISELTGKITKSAKEKVQRSLKHEDINLQEIISAAGKELSEAFKQKTSEILSHAHAALDQPLPTTLKKQEEKEILKSQLDSLLGLYHLLDWFAVDESNEVDPEFSARLTGIKLEMEPSLSFYNKARNYATKKPYSVEKFKLNFQMPTLASGWDVNKEKNNGAILFVKNGLYYLGIMPKQKGRYKALSFEPTEKTSEGFDKMYYDYFPDAAKMIPKCSTQLKAVTAHFQTHTTPILLSNNFIEPLEITKEIYDLNNPEKEPKKFQTAYAKKTGDQKGYREALSKWIDFTRDFLSKYTKTTSIDLSSLRPSSQYKDLGEYYAELNPLLYHISFQRIAEKEIMDAVETGKLYLFQIYNKDFAKGHHGKPNLHTLYWTGLFSPENLAKTSIKLNGQAELFYRPKSRMKRMAHRLGEKMLNKKLKDQKTPIPDTLYQELYDYVNHRLSHDLSDEARALLPNVITKEVSHEIIKDRRFTSDKFFFHVPITLNYQAANSPSKFNQRVNAYLKEHPETPIIGIDRGERNLIYITVIDSTGKILEQRSLNTIQQFDYQKKLDNREKERVAARQAWSVVGTIKDLKQGYLSQVIHEIVDLMIHYQAVVVLENLNFGFKSKRTGIAEKAVYQQFEKMLIDKLNCLVLKDYPAEKVGGVLNPYQLTDQFTSFAKMGTQSGFLFYVPAPYTSKIDPLTGFVDPFVWKTIKNHESRKHFLEGFDFLHYDVKTGDFILHFKMNRNLSFQRGLPGFMPAWDIVFEKNETQFDAKGTPFIAGKRIVPVIENHRFTGRYRDLYPANELIALLEEKGIVFRDGSNILPKLLENDDSHAIDTMVALIRSVLQMRNSNAATGEDYINSPVRDLNGVCFDSRFQNPEWPMDADANGAYHIALKGQLLLNHLKESKDLKLQNGISNQDWLAYIQELRNKRPAATKKAGQAKKKKG

SEQ ID NO: 1016 - protein, 1307 aa, Acidaminococcus sp. strain BV3L6
MTQFEGFTNLYQVSKTLRFELIPQGKTLKHIQEQGFIEEDKARNDHYKELKPIIDRIYKTYADQCLQLVQLDWENLSAAIDSYRKEKTEETRNALIEEQATYRNAIHDYFIGRTDNLTDAINKRHAEIYKGLFKAELFNGKVLKQLGTVTTTEHENALLRSFDKFTTYFSGFYENRKNVFSAEDISTAIPHRIVQDNFPKFKENCHIFTRLITAVPSLREHFENVKKAIGIFVSTSIEEVFSFPFYNQLLTQTQIDLYNQLLGGISREAGTEKIKGLNEVLNLAIQKNDETAHIIASLPHRFIPLFKQILSDRNTLSFILEEFKSDEEVIQSFCKYKTLLRNENVLETAEALFNELNSIDLTHIFISHKKLETISSALCDHWDTLRNALYERRISELTGKITKSAKEKVQRSLKHEDINLQEIISAAGKELSEAFKQKTSEILSHAHAALDQPLPTTLKKQEEKEILKSQLDSLLGLYHLLDWFAVDESNEVDPEFSARLTGIKLEMEPSLSFYNKARNYATKKPYSVEKFKLNFQMPTLASGWDVNKEKNNGAILFVKNGLYYLGIMPKQKGRYKALSFEPTEKTSEGFDKMYYDYFPDAAKMIPKCSTQLKAVTAHFQTHTTPILLSNNFIEPLEITKEIYDLNNPEKEPKKFQTAYAKKTGDQKGYREALCKWIDFTRDFLSKYTKTTSIDLSSLRPSSQYKDLGEYYAELNPLLYHISFQRIAEKEIMDAVETGKLYLFQIYNKDFAKGHHGKPNLHTLYWTGLFSPENLAKTSIKLNGQAELFYRPKSRMKRMAHRLGEKMLNKKLKDQKTPIPDTLYQELYDYVNHRLSHDLSDEARALLPNVITKEVSHEIIKDRRFTSDKFFFHVPITLNYQAANSPSKFNQRVNAYLKEHPETPIIGIDRGERNLIYITVIDSTGKILEQRSLNTIQQFDYQKKLDNREKERVAARQAWSVVGTIKDLKQGYLSQVIHEIVDLMIHYQAVVVLENLNFGFKSKRTGIAEKAVYQQFEKMLIDKLNCLVLKDYPAEKVGGVLNPYQLTDQFTSFAKMGTQSGFLFYVPAPYTSKIDPLTGFVDPFVWKTIKNHESRKHFLEGFDFLHYDVKTGDFILHFKMNRNLSFQRGLPGFMPAWDIVFEKNETQFDAKGTPFIAGKRIVPVIENHRFTGRYRDLYPANELIALLEEKGIVFRDGSNILPKLLENDDSHAIDTMVALIRSVLQMRNSNAATGEDYINSPVRDLNGVCFDSRFQNPEWPMDADANGAYHIALKGQLLLNHLKESKDLKLQNGISNQDWLAYIQELRN

SEQ ID NO: 1017 - protein, 1228 aa, Lachnospiraceae bacterium ND2006
MSKLEKFTNCYSLSKTLRFKAIPVGKTQENIDNKRLLVEDEKRAEDYKGVKKLLDRYYLSFINDVLHSIKLKNLNNYISLFRKKTRTEKENKELENLEINLRKEIAKAFKGNEGYKSLFKKDIIETILPEFLDDKDEIALVNSFNGFTTAFTGFFDNRENMFSEEAKSTSIAFRCINENLTRYISNMDIFEKVDAIFDKHEVQEIKEKILNSDYDVEDFFEGEFFNFVLTQEGIDVYNAIIGGFVTESGEKIKGLNEYINLYNQKTKQKLPKFKPLYKQVLSDRESLSFYGEGYTSDEEVLEVFRNTLNKNSEIFSSIKKLEKLFKNFDEYSSAGIFVKNGPAISTISKDIFGEWNVIRDKWNAEYDDIHLKKKAVVTEKYEDDRRKSFKKIGSFSLEQLQEYADADLSVVEKLKEIIIQKVDEIYKVYGSSEKLFDADFVLEKSLKKNDAVVAIMKDLLDSVKSFENYIKAFFGEGKETNRDESFYGDFVLAYDILLKVDHIYDAIRNYVTQKPYSKDKFKLYFQNPQFMGGWDKDKETDYRATILRYGSKYYLAIMDKKYAKCLQKIDKDDVNGNYEKINYKLLPGPNKMLPKVFFSKKWMAYYNPSEDIQKIYKNGTFKKGDMFNLNDCHKLIDFFKDSISRYPKWSNAYDFNFSETEKYKDIAGFYREVEEQGYKVSFESASKKEVDKLVEEGKLYMFQIYNKDFSDKSHGTPNLHTMYFKLLFDENNHGQIRLSGGAELFMRRASLKKEELVVHPANSPIANKNPDNPKKTTTLSYDVYKDKRFSEDQYELHIPIAINKCPKNIFKINTEVRVLLKHDDNPYVIGIDRGERNLLYIVVVDGKGNIVEQYSLNEIINNFNGIRIKTDYHSLLDKKEKERFEARQNWTSIENIKELKAGYISQVVHKICELVEKYDAVIALEDLNSGFKNSRVKVEKQVYQKFEKMLIDKLNYMVDKKSNPCATGGALKGYQITNKFESFKSMSTQNGFIFYIPAWLTSKIDPSTGFVNLLKTKYTSIADSKKFISSFDRIMYVPEEDLFEFALDYKNFSRTDADYIKKWKLYSYGNRIRIFRNPKKNNVFDWEEVCLTSAYKELFNKYGINYQQGDIRALLCEQSDKAFYSSFMALMSLMLQMRNSITGRTDVDFLISPVKNSDGIFYDSRNYEAQENAILPKNADANGAYNIARKVLWAIGQFKKAEDEKLDKVKIAISNKEWLEYAQTSVKH

SEQ ID NO: 1018 - protein, 1206 aa, Lachnospiraceae bacterium MA2020
MYYESLTKQYPVSKTIRNELIPIGKTLDNIRQNNILESDVKRKQNYEHVKGILDEYHKQLINEALDNCTLPSLKIAAEIYLKNQKEVSDREDFNKTQDLLRKEVVEKLKAHENFTKIGKKDILDLLEKLPSISEDDYNALESFRNFYTYFTSYNKVRENLYSDKEKSSTVAYRLINENFPKFLDNVKSYRFVKTAGILADGLGEEEQDSLFIVETFNKTLTQDGIDTYNSQVGKINSSINLYNQKNQKANGFRKIPKMKMLYKQILSDREESFIDEFQSDEVLIDNVESYGSVLIESLKSSKVSAFFDALRESKGKNVYVKNDLAKTAMSNIVFENWRTFDDLLNQEYDLANENKKKDDKYFEKRQKELKKNKSYSLEHLCNLSEDSCNLIENYIHQISDDIENIIINNETFLRIVINEHDRSRKLAKNRKAVKAIKDFLDSIKVLERELKLINSSGQELEKDLIVYSAHEELLVELKQVDSLYNMTRNYLTKKPFSTEKVKLNFNRSTLLNGWDRNKETDNLGVLLLKDGKYYLGIMNTSANKAFVNPPVAKTEKVFKKVDYKLLPVPNQMLPKVFFAKSNIDFYNPSSEIYSNYKKGTHKKGNMFSLEDCHNLIDFFKESISKHEDWSKFGFKFSDTASYNDISEFYREVEKQGYKLTYTDIDETYINDLIERNELYLFQIYNKDFSMYSKGKLNLHTLYFMMLFDQRNIDDVVYKLNGEAEVFYRPASISEDELIIHKAGEEIKNKNPNRARTKETSTFSYDIVKDKRYSKDKFTLHIPITMNFGVDEVKRFNDAVNSAIRIDENVNVIGIDRGERNLLYVVVIDSKGNILEQISLNSIINKEYDIETDYHALLDEREGGRDKARKDWNTVENIRDLKAGYLSQVVNVVAKLVLKYNAIICLEDLNFGFKRGRQKVEKQVYQKFEKMLIDKLNYLVIDKSREQTSPKELGGALNALQLTSKFKSFKELGKQSGVIYYVPAYLTSKIDPTTGFANLFYMKCENVEKSKRFFDGFDFIRFNALENVFEFGFDYRSFTQRACGINSKWTVCTNGERIIKYRNPDKNNMFDEKVVVVTDEMKNLFEQYKIPYEDGRNVKDMIISNEEAEFYRRLYRLLQQTLQMRNSTSDGTRDYIISPVKNKREAYFNSELSDGSVPKDADANGAYNIARKGLWVLEQIRQKSEGEKINLAMTNAEWLEYAQTHLL

SEQ ID NO: 1019 - DNA, 4059 bp, Acidaminococcus sp. strain BV3L6
atgacccagttcgagggcttcaccaacctgtaccaggtgagcaagaccctgcggttcgagctgatcccccagggcaagaccctgaagcacatccaggagcagggcttcatcgaggaggacaaggcccggaacgaccactacaaggagctgaagcccatcatcgaccggatctacaagacctacgccgaccagtgcctgcagctggtgcagctggactgggagaacctgagcgccgccatcgacagctaccggaaggagaagaccgaggagacccggaacgccctgatcgaggagcaggccacctaccggaacgccatccacgactacttcatcggccggaccgacaacctgaccgacgccatcaacaagcggcacgccgagatctacaagggcctgttcaaggccgagctgttcaacggcaaggtgctgaagcagctgggcaccgtgaccaccaccgagcacgagaacgccctgctgcggagcttcgacaagttcaccacctacttcagcggcttctacgagaaccggaagaacgtgttcagcgccgaggacatcagcaccgccatcccccaccggatcgtgcaggacaacttccccaagttcaaggagaactgccacatcttcacccggctgatcaccgccgtgcccagcctgcgggagcacttcgagaacgtgaagaaggccatcggcatcttcgtgagcaccagcatcgaggaggtgttcagcttccccttctacaaccagctgctgacccagacccagatcgacctgtacaaccagctgctgggcggcatcagccgggaggccggcaccgagaagatcaagggcctgaacgaggtgctgaacctggccatccagaagaacgacgagaccgcccacatcatcgccagcctgccccaccggttcatccccctgttcaagcagatcctgagcgaccggaacaccctgagcttcatcctggaggagttcaagagcgacgaggaggtgatccagagcttctgcaagtacaagaccctgctgcggaacgagaacgtgctggagaccgccgaggccctgttcaacgagctgaacagcatcgacctgacccacatcttcatcagccacaagaagctggagaccatcagcagcgccctgtgcgaccactgggacaccctgcggaacgccctgtacgagcggcggatcagcgagctgaccggcaagatcaccaagagcgccaaggagaaggtgcagcggagcctgaagcacgaggacatcaacctgcaggagatcatcagcgccgccggcaaggagctgagcgaggccttcaagcagaagaccagcgagatcctgagccacgcccacgccgccctggaccagcccctgcccaccaccctgaagaagcaggaggagaaggagatcctgaaaagccagctggacagcctgctgggcctgtaccacctgctggactggttcgccgtggacgagagcaacgaggtggaccccgagttcagcgcccggctgaccggcatcaagctggagatggagcccagcctgagcttctacaacaaggcccggaactacgccaccaagaagccctacagcgtggagaagttcaagctgaacttccagatgcccaccctggccagcggctgggacgtgaacaaggagaagaacaacggcgccatcctgttcgtgaagaacggcctgtactacctgggcatcatgcccaagcagaagggccggtacaaggccctgagcttcgagcccaccgagaagaccagcgagggcttcgacaagatgtactacgactacttccccgacgccgccaagatgatccccaagtgcagcacccagctgaaggccgtgaccgcccacttccagacccacaccacccccatcctgctgagcaacaacttcatcgagcccctggagatcaccaaggagatctacgacctgaacaaccccgagaaggagcccaagaagttccagaccgcctacgccaagaagaccggcgaccagaagggctaccgggaggccctgtgcaagtggatcgacttcacccgggacttcctgagcaagtacaccaagaccaccagcatcgacctgagcagcctgcggcccagcagccagtacaaggacctgggcgagtactacgccgagctgaaccccctgctgtaccacatcagcttccagcggatcgccgagaaggagatcatggacgccgtggagaccggcaagctgtacctgttccagatctacaacaaggacttcgccaagggccaccacggcaagcccaacctgcacaccctgtactggaccggcctgttcagccccgagaacctggccaagaccagcatcaagctgaacggccaggccgagctgttctaccggcccaagagccggatgaagcggatggcccaccggctgggcgagaagatgctgaacaagaagctgaaggaccagaagacccccatccccgacaccctgtaccaggagctgtacgactacgtgaaccaccggctgagccacgacctgagcgacgaggcccgggccctgctgcccaacgtgatcaccaaggaggtgagccacgagatcatcaaggaccggcggttcaccagcgacaagttcttcttccacgtgcccatcaccctgaactaccaggccgccaacagccccagcaagttcaaccagcgggtgaacgcctacctgaaggagcaccccgagacccccatcatcggcatcgaccggggcgagcggaacctgatctacatcaccgtgatcgacagcaccggcaagatcctggagcagcggagcctgaacaccatccagcagttcgactaccagaagaagctggacaaccgggagaaggagcgggtggccgcccggcaggcctggagcgtggtgggcaccatcaaggacctgaagcagggctacctgagccaggtgatccacgagatcgtggacctgatgatccactaccaggccgtggtggtgctggagaacctgaacttcggcttcaagagcaagcggaccggcatcgccgagaaggccgtgtaccagcagttcgagaagatgctgatcgacaagctgaactgcctggtgctgaaggactaccccgccgagaaggtgggcggcgtgctgaacccctaccagctgaccgaccagttcaccagcttcgccaagatgggcacccagagcggcttcctgttctacgtgcccgccccctacaccagcaagatcgaccccctgaccggcttcgtggaccccttcgtgtggaagaccatcaagaaccacgagagccggaagcacttcctggagggcttcgacttcctgcactacgacgtgaagaccggcgacttcatcctgcacttcaagatgaaccggaacctgagcttccagcggggcctgcccggcttcatgcccgcctgggacatcgtgttcgagaagaacgagacccagttcgacgccaagggcacccccttcatcgccggcaagcggatcgtgcccgtgatcgagaaccaccggttcaccggccggtaccgggacctgtaccccgccaacgagctgatcgccctgctggaggagaagggcatcgtgttccgggacggcagcaacatcctgcccaagctgctggagaacgacgacagccacgccatcgacaccatggtggccctgatccggagcgtgctgcagatgcggaacagcaacgccgccaccggcgaggactacatcaacagccccgtgcgggacctgaacggcgtgtgcttcgacagccggttccagaaccccgagtggcccatggacgccgacgccaacggcgcctaccacatcgccctgaagggccagctgctgctgaaccacctgaaggagagcaaggacctgaagctgcagaacggcatcagcaaccaggactggctggcctacatccaggagctgcggaacaagcggcccgccgccaccaagaaggccggccaggccaagaagaagaagggcagctacccctacgacgtgcccgactacgcctacccctacgacgtgcccgactacgcctacccctacgacgtgcccgactacgcctga

SEQ ID NO: 1020 - DNA, 3822 bp, Lachnospiraceae bacterium ND2006
atgagcaagctggagaagttcaccaactgctacagcctgagcaagaccctgcggttcaaggccatccccgtgggcaagacccaggagaacatcgacaacaagcggctgctggtggaggacgagaagcgggccgaggactacaagggcgtgaagaagctgctggaccggtactacctgagcttcatcaacgacgtgctgcacagcatcaagctgaagaacctgaacaactacatcagcctgttccggaagaagacccggaccgagaaggagaacaaggagctggagaacctggagatcaacctgcggaaggagatcgccaaggccttcaagggcaacgagggctacaagagcctgttcaagaaggacatcatcgagaccatcctgcccgagttcctggacgacaaggacgagatcgccctggtgaacagcttcaacggcttcaccaccgccttcaccggcttcttcgacaaccgggagaacatgttcagcgaggaggccaagagcaccagcatcgccttccggtgcatcaacgagaacctgacccggtacatcagcaacatggacatcttcgagaaggtggacgccatcttcgacaagcacgaggtgcaggagatcaaggagaagatcctgaacagcgactacgacgtggaggacttcttcgagggcgagttcttcaacttcgtgctgacccaggagggcatcgacgtgtacaacgccatcatcggcggcttcgtgaccgagagcggcgagaagatcaagggcctgaacgagtacatcaacctgtacaaccagaagaccaagcagaagctgcccaagttcaagcccctgtacaagcaggtgctgagcgaccgggagagcctgagcttctacggcgagggctacaccagcgacgaggaggtgctggaggtgttccggaacaccctgaacaagaacagcgagatcttcagcagcatcaagaagctggagaagctgttcaagaacttcgacgagtacagcagcgccggcatcttcgtgaagaacggccccgccatcagcaccatcagcaaggacatcttcggcgagtggaacgtgatccgggacaagtggaacgccgagtacgacgacatccacctgaagaagaaggccgtggtgaccgagaagtacgaggacgaccggcggaaaagcttcaagaagatcggcagcttcagcctggagcagctgcaggagtacgccgacgccgacctgagcgtggtggagaagctgaaggagatcatcatccagaaggtggacgagatctacaaggtgtacggcagcagcgagaagctgttcgacgccgacttcgtgctggagaaaagcctgaagaagaacgacgccgtggtggccatcatgaaggacctgctggacagcgtgaaaagcttcgagaactacatcaaggccttcttcggcgagggcaaggagaccaaccgggacgagagcttctacggcgacttcgtgctggcctacgacatcctgctgaaggtggaccacatctacgacgccatccggaactacgtgacccagaagccctacagcaaggacaagttcaagctgtacttccagaacccccagttcatgggcggctgggacaaggacaaggagaccgactaccgggccaccatcctgcggtacggcagcaagtactacctggccatcatggacaagaagtacgccaagtgcctgcagaagatcgacaaggacgacgtgaacggcaactacgagaagatcaactacaagctgctgcccggccccaacaagatgctgcccaaggtgttcttcagcaagaagtggatggcctactacaaccccagcgaggacatccagaagatctacaagaacggcaccttcaagaagggcgacatgttcaacctgaacgactgccacaagctgatcgacttcttcaaggacagcatcagccggtaccccaagtggagcaacgcctacgacttcaacttcagcgagaccgagaagtacaaggacatcgccggcttctaccgggaggtggaggagcagggctacaaggtgagcttcgagagcgccagcaagaaggaggtggacaagctggtggaggagggcaagctgtacatgttccagatctacaacaaggacttcagcgacaagagccacggcacccccaacctgcacaccatgtacttcaagctgctgttcgacgagaacaaccacggccagatccggctgagcggcggcgccgagctgttcatgcggcgggccagcctgaagaaggaggagctggtggtgcaccccgccaacagccccatcgccaacaagaaccccgacaaccccaagaagaccaccaccctgagctacgacgtgtacaaggacaagcggttcagcgaggaccagtacgagctgcacatccccatcgccatcaacaagtgccccaagaacatcttcaagatcaacaccgaggtgcgggtgctgctgaagcacgacgacaacccctacgtgatcggcatcgaccggggcgagcggaacctgctgtacatcgtggtggtggacggcaagggcaacatcgtggagcagtacagcctgaacgagatcatcaacaacttcaacggcatccggatcaagaccgactaccacagcctgctggacaagaaggagaaggagcggttcgaggcccggcagaactggaccagcatcgagaacatcaaggagctgaaggccggctacatcagccaggtggtgcacaagatctgcgagctggtggagaagtacgacgccgtgatcgccctggaggacctgaacagcggcttcaagaacagccgggtgaaggtggagaagcaggtgtaccagaagttcgagaagatgctgatcgacaagctgaactacatggtggacaagaaaagcaacccctgcgccaccggcggcgccctgaagggctaccagatcaccaacaagttcgagagcttcaagagcatgagcacccagaacggcttcatcttctacatccccgcctggctgaccagcaagatcgaccccagcaccggcttcgtgaacctgctgaagaccaagtacaccagcatcgccgacagcaagaagttcatcagcagcttcgaccggatcatgtacgtgcccgaggaggacctgttcgagttcgccctggactacaagaacttcagccggaccgacgccgactacatcaagaagtggaagctgtacagctacggcaaccggatccggatcttccggaaccccaagaagaacaacgtgttcgactgggaggaggtgtgcctgaccagcgcctacaaggagctgttcaacaagtacggcatcaactaccagcagggcgacatccgggccctgctgtgcgagcagagcgacaaggccttctacagcagcttcatggccctgatgagcctgatgctgcagatgcggaacagcatcaccggccggaccgacgtggacttcctgatcagccccgtgaagaacagcgacggcatcttctacgacagccggaactacgaggcccaggagaacgccatcctgcccaagaacgccgacgccaacggcgcctacaacatcgcccggaaggtgctgtgggccatcggccagttcaagaaggccgaggacgagaagctggacaaggtgaagatcgccatcagcaacaaggagtggctggagtacgcccagaccagcgtgaagcacaagcggcccgccgccaccaagaaggccggccaggccaagaagaagaagggcagctacccctacgacgtgcccgactacgcctacccctacgacgtgcccgactacgcctacccctacgacgtgcccgactacgcctga

SEQ ID NO: 1021 - DNA, 3756 bp, Lachnospiraceae bacterium MA2020
atgtactacgagagcctgaccaagcagtaccccgtgagcaagaccatccggaacgagctgatccccatcggcaagaccctggacaacatccggcagaacaacatcctggagagcgacgtgaagcggaagcagaactacgagcacgtgaagggcatcctggacgagtaccacaagcagctgatcaacgaggccctggacaactgcaccctgcccagcctgaagatcgccgccgagatctacctgaagaaccagaaggaggtgagcgaccgggaggacttcaacaagacccaggacctgctgcggaaggaggtggtggagaagctgaaggcccacgagaacttcaccaagatcggcaagaaggacatcctggacctgctggagaagctgcccagcatcagcgaggacgactacaacgccctggagagcttccggaacttctacacctacttcaccagctacaacaaggtgcgggagaacctgtacagcgacaaggagaaaagcagcaccgtggcctaccggctgatcaacgagaacttccccaagttcctggacaacgtgaaaagctaccggttcgtgaagaccgccggcatcctggccgacggcctgggcgaggaggagcaggacagcctgttcatcgtggagaccttcaacaagaccctgacccaggacggcatcgacacctacaacagccaggtgggcaagatcaacagcagcatcaacctgtacaaccagaagaaccagaaggccaacggcttccggaagatccccaagatgaagatgctgtacaagcagatcctgagcgaccgggaggagagcttcatcgacgagttccagagcgacgaggtgctgatcgacaacgtggagagctacggcagcgtgctgatcgagagcctgaaaagcagcaaggtgagcgccttcttcgacgccctgcgggagagcaagggcaagaacgtgtacgtgaagaacgacctggccaagaccgccatgagcaacatcgtgttcgagaactggcggaccttcgacgacctgctgaaccaggagtacgacctggccaacgagaacaagaagaaggacgacaagtacttcgagaagcggcagaaggagctgaagaagaacaagagctacagcctggagcacctgtgcaacctgagcgaggacagctgcaacctgatcgagaactacatccaccagatcagcgacgacatcgagaacatcatcatcaacaacgagaccttcctgcggatcgtgatcaacgagcacgaccggagccggaagctggccaagaaccggaaggccgtgaaggccatcaaggacttcctggacagcatcaaggtgctggagcgggagctgaagctgatcaacagcagcggccaggagctggagaaggacctgatcgtgtacagcgcccacgaggagctgctggtggagctgaagcaggtggacagcctgtacaacatgacccggaactacctgaccaagaagcccttcagcaccgagaaggtgaagctgaacttcaaccggagcaccctgctgaacggctgggaccggaacaaggagaccgacaacctgggcgtgctgctgctgaaggacggcaagtactacctgggcatcatgaacaccagcgccaacaaggccttcgtgaacccccccgtggccaagaccgagaaggtgttcaagaaggtggactacaagctgctgcccgtgcccaaccagatgctgcccaaggtgttcttcgccaagagcaacatcgacttctacaaccccagcagcgagatctacagcaactacaagaagggcacccacaagaagggcaacatgttcagcctggaggactgccacaacctgatcgacttcttcaaggagagcatcagcaagcacgaggactggagcaagttcggcttcaagttcagcgacaccgccagctacaacgacatcagcgagttctaccgggaggtggagaagcagggctacaagctgacctacaccgacatcgacgagacctacatcaacgacctgatcgagcggaacgagctgtacctgttccagatctacaacaaggacttcagcatgtacagcaagggcaagctgaacctgcacaccctgtacttcatgatgctgttcgaccagcggaacatcgacgacgtggtgtacaagctgaacggcgaggccgaggtgttctaccggcccgccagcatcagcgaggacgagctgatcatccacaaggccggcgaggagatcaagaacaagaaccccaaccgggcccggaccaaggagaccagcaccttcagctacgacatcgtgaaggacaagcggtacagcaaggacaagttcaccctgcacatccccatcaccatgaacttcggcgtggacgaggtgaagcggttcaacgacgccgtgaacagcgccatccggatcgacgagaacgtgaacgtgatcggcatcgaccggggcgagcggaacctgctgtacgtggtggtgatcgacagcaagggcaacatcctggagcagatcagcctgaacagcatcatcaacaaggagtacgacatcgagaccgactaccacgccctgctggacgagcgggagggcggccgggacaaggcccggaaggactggaacaccgtggagaacatccgggacctgaaggccggctacctgagccaggtggtgaacgtggtggccaagctggtgctgaagtacaacgccatcatctgcctggaggacctgaacttcggcttcaagcggggccggcagaaggtggagaagcaggtgtaccagaagttcgagaagatgctgatcgacaagctgaactacctggtgatcgacaagagccgggagcagaccagccccaaggagctgggcggcgccctgaacgccctgcagctgaccagcaagttcaagagcttcaaggagctgggcaagcagagcggcgtgatctactacgtgcccgcctacctgaccagcaagatcgaccccaccaccggcttcgccaacctgttctacatgaagtgcgagaacgtggagaaaagcaagcggttcttcgacggcttcgacttcatccggttcaacgccctggagaacgtgttcgagttcggcttcgactaccggagcttcacccagcgggcctgcggcatcaacagcaagtggaccgtgtgcaccaacggcgagcggatcatcaagtaccggaaccccgacaagaacaacatgttcgacgagaaggtggtggtggtgaccgacgagatgaagaacctgttcgagcagtacaagatcccctacgaggacggccggaacgtgaaggacatgatcatcagcaacgaggaggccgagttctaccggcggctgtaccggctgctgcagcagaccctgcagatgcggaacagcaccagcgacggcacccgggactacatcatcagccccgtgaagaacaagcgggaggcctacttcaacagcgagctgagcgacggcagcgtgcccaaggacgccgacgccaacggcgcctacaacatcgcccggaagggcctgtgggtgctggagcagatccggcagaaaagcgagggcgagaagatcaacctggccatgaccaacgccgagtggctggagtacgcccagacccacctgctgaagcggcccgccgccaccaagaaggccggccaggccaagaagaagaagggcagctacccctacgacgtgcccgactacgcctacccctacgacgtgcccgactacgcctacccctacgacgtgcccgactacgcctga

SEQ ID NO: 1022 - RNA, 40 nt, Artificial Sequence
  HBG1-1 full-length gRNA
uaauuucuacucuuguagauccuugucaaggcuauugguc

SEQ ID NO: 1023 - RNA, 41 nt, Artificial Sequence
  HBG1-1 modified full-length gRNA
  misc_feature (40)..(40): Modified to include 2'-O-methyl
  misc_feature (40)..(41): Linked by phosphorodithioate (PS2) bond
  misc_feature (41)..(41): Modified to include 2'-O-methyl
uaauuucuacucuuguagauccuugucaaggcuauugguca

SEQ ID NO: 1024 - RNA, 95 nt, Artificial Sequence
  tSpA dead gRNA
  misc_feature (1)..(1): Modified to contain 2'-O-methyl
  misc_feature (1)..(2): Linked by phosphorothioate (PS) bond
  misc_feature (2)..(3): Linked by phosphorothioate (PS) bond
  misc_feature (2)..(2): Modified to contain 2'-O-methyl
  misc_feature (3)..(4): Linked by phosphorothioate (PS) bond
  misc_feature (3)..(3): Modified to contain 2'-O-methyl
  misc_feature (92)..(93): Linked by phosphorothioate (PS) bond
  misc_feature (92)..(92): Modified to contain 2'-O-methyl
  misc_feature (93)..(94): Linked by phosphorothioate (PS) bond
  misc_feature (93)..(93): Modified to contain 2'-O-methyl
  misc_feature (94)..(95): Linked by phosphorothioate (PS) bond
  misc_feature (94)..(94): Modified to contain 2'-O-methyl
ggcuggccaacccauguuuuagagcuagaaauagcaaguuaaaauaaggcuaguccguuaucaacuugaaaaaguggcaccgagucggugcuuuu

SEQ ID NO: 1025 - RNA, 100 nt, Artificial Sequence; identical to SEQ ID NO: 997
  SpA full-length gRNA
  misc_feature (1)..(1): Modified to contain 2'-O-methyl
  misc_feature (1)..(2): Linked by phosphorothioate (PS) bond
  misc_feature (2)..(2): Modified to contain 2'-O-methyl
  misc_feature (2)..(3): Linked by phosphorothioate (PS) bond
  misc_feature (3)..(3): Modified to contain 2'-O-methyl
  misc_feature (3)..(4): Linked by phosphorothioate (PS) bond
  misc_feature (97)..(97): Modified to contain 2'-O-methyl
  misc_feature (97)..(98): Linked by phosphorothioate (PS) bond
  misc_feature (98)..(98): Modified to contain 2'-O-methyl
  misc_feature (98)..(99): Linked by phosphorothioate (PS) bond
  misc_feature (99)..(100): Linked by phosphorothioate (PS) bond
  misc_feature (99)..(99): Modified to contain 2'-O-methyl

SEQ ID NO: 1026 - RNA, 100 nt, Artificial Sequence
  SpG full-length gRNA
  misc_feature (1)..(1): Modified to contain 2'-O-methyl
  misc_feature (1)..(2): Linked by phosphorothioate (PS) bond
  misc_feature (2)..(2): Modified to contain 2'-O-methyl
  misc_feature (2)..(3): Linked by phosphorothioate (PS) bond
  misc_feature (3)..(3): Modified to contain 2'-O-methyl
  misc_feature (3)..(4): Linked by phosphorothioate (PS) bond
  misc_feature (97)..(97): Modified to contain 2'-O-methyl
  misc_feature (97)..(98): Linked by phosphorothioate (PS) bond
  misc_feature (98)..(98): Modified to contain 2'-O-methyl
  misc_feature (98)..(99): Linked by phosphorothioate (PS) bond
  misc_feature (99)..(100): Linked by phosphorothioate (PS) bond
  misc_feature (99)..(99): Modified to contain 2'-O-methyl
uagucuuagaguauccagugguuuuagagcuagaaauagcaaguuaaaauaaggcuaguccguuaucaacuugaaaaaguggcaccgagucggugcuuuu

SEQ ID NO: 1027 - RNA, 95 nt, Artificial Sequence
  Sp182 dead gRNA
  misc_feature (1)..(1): Modified to contain 2'-O-methyl
  misc_feature (1)..(2): Linked by phosphorothioate (PS) bond
  misc_feature (2)..(3): Linked by phosphorothioate (PS) bond
  misc_feature (2)..(2): Modified to contain 2'-O-methyl
  misc_feature (3)..(4): Linked by phosphorothioate (PS) bond
  misc_feature (3)..(3): Modified to contain 2'-O-methyl
  misc_feature (92)..(93): Linked by phosphorothioate (PS) bond
  misc_feature (92)..(92): Modified to contain 2'-O-methyl
  misc_feature (93)..(94): Linked by phosphorothioate (PS) bond
  misc_feature (93)..(93): Modified to contain 2'-O-methyl
  misc_feature (94)..(95): Linked by phosphorothioate (PS) bond
  misc_feature (94)..(94): Modified to contain 2'-O-methyl
uuagaguauccagugguuuuagagcuagaaauagcaaguuaaaauaaggcuaguccguuaucaacuugaaaaaguggcaccgagucggugcuuuu

SEQ ID NO: 1028 - RNA, 15 nt, Artificial Sequence
  Sp182 dead gRNA targeting domain
uuagaguauccagug

SEQ ID NO: 1029 - DNA, 15 bp, Artificial Sequence
  Sp182 dgRNA targeting domain
ttagagtatccagtg

SEQ ID NO: 1030 - DNA, 20 bp, Artificial Sequence
  SpG gRNA targeting domain
tagtcttagagtatccagtg

SEQ ID NO: 1031 - DNA, 15 bp, Artificial Sequence
  tSpA dead gRNA targeting domain
ggctggccaacccat

SEQ ID NO: 1032 - protein, 1334 aa, Artificial Sequence
  His-AsCpf1-sNLS-sNLS H800A
  MISC_FEATURE (3)..(8): His tag
  MISC_FEATURE (1319)..(1325): sNLS
  MISC_FEATURE (1328)..(1334): sNLS
MGHHHHHHGSTQFEGFTNLYQVSKTLRFELIPQGKTLKHIQEQGFIEEDKARNDHYKELKPIIDRIYKTYADQCLQLVQLDWENLSAAIDSYRKEKTEETRNALIEEQATYRNAIHDYFIGRTDNLTDAINKRHAEIYKGLFKAELFNGKVLKQLGTVTTTEHENALLRSFDKFTTYFSGFYENRKNVFSAEDISTAIPHRIVQDNFPKFKENCHIFTRLITAVPSLREHFENVKKAIGIFVSTSIEEVFSFPFYNQLLTQTQIDLYNQLLGGISREAGTEKIKGLNEVLNLAIQKNDETAHIIASLPHRFIPLFKQILSDRNTLSFILEEFKSDEEVIQSFCKYKTLLRNENVLETAEALFNELNSIDLTHIFISHKKLETISSALCDHWDTLRNALYERRISELTGKITKSAKEKVQRSLKHEDINLQEIISAAGKELSEAFKQKTSEILSHAHAALDQPLPTTLKKQEEKEILKSQLDSLLGLYHLLDWFAVDESNEVDPEFSARLTGIKLEMEPSLSFYNKARNYATKKPYSVEKFKLNFQMPTLASGWDVNKEKNNGAILFVKNGLYYLGIMPKQKGRYKALSFEPTEKTSEGFDKMYYDYFPDAAKMIPKCSTQLKAVTAHFQTHTTPILLSNNFIEPLEITKEIYDLNNPEKEPKKFQTAYAKKTGDQKGYREALCKWIDFTRDFLSKYTKTTSIDLSSLRPSSQYKDLGEYYAELNPLLYHISFQRIAEKEIMDAVETGKLYLFQIYNKDFAKGHHGKPNLHTLYWTGLFSPENLAKTSIKLNGQAELFYRPKSRMKRMAARLGEKMLNKKLKDQKTPIPDTLYQELYDYVNHRLSHDLSDEARALLPNVITKEVSHEIIKDRRFTSDKFFFHVPITLNYQAANSPSKFNQRVNAYLKEHPETPIIGIDRGERNLIYITVIDSTGKILEQRSLNTIQQFDYQKKLDNREKERVAARQAWSVVGTIKDLKQGYLSQVIHEIVDLMIHYQAVVVLENLNFGFKSKRTGIAEKAVYQQFEKMLIDKLNCLVLKDYPAEKVGGVLNPYQLTDQFTSFAKMGTQSGFLFYVPAPYTSKIDPLTGFVDPFVWKTIKNHESRKHFLEGFDFLHYDVKTGDFILHFKMNRNLSFQRGLPGFMPAWDIVFEKNETQFDAKGTPFIAGKRIVPVIENHRFTGRYRDLYPANELIALLEEKGIVFRDGSNILPKLLENDDSHAIDTMVALIRSVLQMRNSNAATGEDYINSPVRDLNGVCFDSRFQNPEWPMDADANGAYHIALKGQLLLNHLKESKDLKLQNGISNQDWLAYIQELRNGSPKKKRKVGSPKKKRKV

SEQ ID NO: 1033 - protein, 1384 aa, Artificial Sequence
  SpCas9WT
MKHHHHHHMPKKKRKVMDKKYSIGLDIGTNSVGWAVITDEYKVPSKKFKVLGNTDRHSIKKNLIGALLFDSGETAEATRLKRTARRRYTRRKNRICYLQEIFSNEMAKVDDSFFHRLEESFLVEEDKKHERHPIFGNIVDEVAYHEKYPTIYHLRKKLVDSTDKADLRLIYLALAHMIKFRGHFLIEGDLNPDNSDVDKLFIQLVQTYNQLFEENPINASGVDAKAILSARLSKSRRLENLIAQLPGEKKNGLFGNLIALSLGLTPNFKSNFDLAEDAKLQLSKDTYDDDLDNLLAQIGDQYADLFLAAKNLSDAILLSDILRVNTEITKAPLSASMIKRYDEHHQDLTLLKALVRQQLPEKYKEIFFDQSKNGYAGYIDGGASQEEFYKFIKPILEKMDGTEELLVKLNREDLLRKQRTFDNGSIPHQIHLGELHAILRRQEDFYPFLKDNREKIEKILTFRIPYYVGPLARGNSRFAWMTRKSEETITPWNFEEVVDKGASAQSFIERMTNFDKNLPNEKVLPKHSLLYEYFTVYNELTKVKYVTEGMRKPAFLSGEQKKAIVDLLFKTNRKVTVKQLKEDYFKKIECFDSVEISGVEDRFNASLGTYHDLLKIIKDKDFLDNEENEDILEDIVLTLTLFEDREMIEERLKTYAHLFDDKVMKQLKRRRYTGWGRLSRKLINGIRDKQSGKTILDFLKSDGFANRNFMQLIHDDSLTFKEDIQKAQVSGQGDSLHEHIANLAGSPAIKKGILQTVKVVDELVKVMGRHKPENIVIEMARENQTTQKGQKNSRERMKRIEEGIKELGSQILKEHPVENTQLQNEKLYLYYLQNGRDMYVDQELDINRLSDYDVDHIVPQSFLKDDSIDNKVLTRSDKNRGKSDNVPSEEVVKKMKNYWRQLLNAKLITQRKFDNLTKAERGGLSELDKAGFIKRQLVETRQITKHVAQILDSRMNTKYDENDKLIREVKVITLKSKLVSDFRKDFQFYKVREINNYHHAHDAYLNAVVGTALIKKYPKLESEFVYGDYKVYDVRKMIAKSEQEIGKATAKYFFYSNIMNFFKTEITLANGEIRKRPLIETNGETGEIVWDKGRDFATVRKVLSMPQVNIVKKTEVQTGGFSKESILPKRNSDKLIARKKDWDPKKYGGFDSPTVAYSVLVVAKVEKGKSKKLKSVKELLGITIMERSSFEKNPIDFLEAKGYKEVKKDLIIKLPKYSLFELENGRKRMLASAGELQKGNELALPSKYVNFLYLASHYEKLKGSPEDNEQKQLFVEQHKHYLDEIIEQISEFSKRVILADANLDKVLSAYNKHRDKPIREQAENIIHLFTLTNLGAPAAFKYFDTTIDRKRYTSTKEVLDATLIHQSITGLYETRIDLSQLGGD

SEQ ID NO: 1034 - protein, 1384 aa, Artificial Sequence
  His-NLS-SpCas9D10A
MKHHHHHHMPKKKRKVMDKKYSIGLAIGTNSVGWAVITDEYKVPSKKFKVLGNTDRHSIKKNLIGALLFDSGETAEATRLKRTARRRYTRRKNRICYLQEIFSNEMAKVDDSFFHRLEESFLVEEDKKHERHPIFGNIVDEVAYHEKYPTIYHLRKKLVDSTDKADLRLIYLALAHMIKFRGHFLIEGDLNPDNSDVDKLFIQLVQTYNQLFEENPINASGVDAKAILSARLSKSRRLENLIAQLPGEKKNGLFGNLIALSLGLTPNFKSNFDLAEDAKLQLSKDTYDDDLDNLLAQIGDQYADLFLAAKNLSDAILLSDILRVNTEITKAPLSASMIKRYDEHHQDLTLLKALVRQQLPEKYKEIFFDQSKNGYAGYIDGGASQEEFYKFIKPILEKMDGTEELLVKLNREDLLRKQRTFDNGSIPHQIHLGELHAILRRQEDFYPFLKDNREKIEKILTFRIPYYVGPLARGNSRFAWMTRKSEETITPWNFEEVVDKGASAQSFIERMTNFDKNLPNEKVLPKHSLLYEYFTVYNELTKVKYVTEGMRKPAFLSGEQKKAIVDLLFKTNRKVTVKQLKEDYFKKIECFDSVEISGVEDRFNASLGTYHDLLKIIKDKDFLDNEENEDILEDIVLTLTLFEDREMIEERLKTYAHLFDDKVMKQLKRRRYTGWGRLSRKLINGIRDKQSGKTILDFLKSDGFANRNFMQLIHDDSLTFKEDIQKAQVSGQGDSLHEHIANLAGSPAIKKGILQTVKVVDELVKVMGRHKPENIVIEMARENQTTQKGQKNSRERMKRIEEGIKELGSQILKEHPVENTQLQNEKLYLYYLQNGRDMYVDQELDINRLSDYDVDHIVPQSFLKDDSIDNKVLTRSDKNRGKSDNVPSEEVVKKMKNYWRQLLNAKLITQRKFDNLTKAERGGLSELDKAGFIKRQLVETRQITKHVAQILDSRMNTKYDENDKLIREVKVITLKSKLVSDFRKDFQFYKVREINNYHHAHDAYLNAVVGTALIKKYPKLESEFVYGDYKVYDVRKMIAKSEQEIGKATAKYFFYSNIMNFFKTEITLANGEIRKRPLIETNGETGEIVWDKGRDFATVRKVLSMPQVNIVKKTEVQTGGFSKESILPKRNSDKLIARKKDWDPKKYGGFDSPTVAYSVLVVAKVEKGKSKKLKSVKELLGITIMERSSFEKNPIDFLEAKGYKEVKKDLIIKLPKYSLFELENGRKRMLASAGELQKGNELALPSKYVNFLYLASHYEKLKGSPEDNEQKQLFVEQHKHYLDEIIEQISEFSKRVILADANLDKVLSAYNKHRDKPIREQAENIIHLFTLTNLGAPAAFKYFDTTIDRKRYTSTKEVLDATLIHQSITGLYETRIDLSQLGGD

SEQ ID NO: 1035 - protein, 1333 aa, Artificial Sequence; identical to SEQ ID NO: 1001
  AsCpf1 His-AsCpf1-NLS-NLS

SEQ ID NO: 1036 - protein, 1332 aa, Artificial Sequence
  AsCpf1 S542R/K607R  (AsCpf1 RR)
MKHHHHHHMPKKKRKVMTQFEGFTNLYQVSKTLRFELIPQGKTLKHIQEQGFIEEDKARNDHYKELKPIIDRIYKTYADQCLQLVQLDWENLSAAIDSYRKEKTEETRNALIEEQATYRNAIHDYFIGRTDNLTDAINKRHAEIYKGLFKAELFNGKVLKQLGTVTTTEHENALLRSFDKFTTYFSGFYENRKNVFSAEDISTAIPHRIVQDNFPKFKENCHIFTRLITAVPSLREHFENVKKAIGIFVSTSIEEVFSFPFYNQLLTQTQIDLYNQLLGGISREAGTEKIKGLNEVLNLAIQKNDETAHIIASLPHRFIPLFKQILSDRNTLSFILEEFKSDEEVIQSFCKYKTLLRNENVLETAEALFNELNSIDLTHIFISHKKLETISSALCDHWDTLRNALYERRISELTGKITKSAKEKVQRSLKHEDINLQEIISAAGKELSEAFKQKTSEILSHAHAALDQPLPTTLKKQEEKEILKSQLDSLLGLYHLLDWFAVDESNEVDPEFSARLTGIKLEMEPSLSFYNKARNYATKKPYSVEKFKLNFQMPTLARGWDVNKEKNNGAILFVKNGLYYLGIMPKQKGRYKALSFEPTEKTSEGFDKMYYDYFPDAAKMIPRCSTQLKAVTAHFQTHTTPILLSNNFIEPLEITKEIYDLNNPEKEPKKFQTAYAKKTGDQKGYREALCKWIDFTRDFLSKYTKTTSIDLSSLRPSSQYKDLGEYYAELNPLLYHISFQRIAEKEIMDAVETGKLYLFQIYNKDFAKGHHGKPNLHTLYWTGLFSPENLAKTSIKLNGQAELFYRPKSRMKRMAHRLGEKMLNKKLKDQKTPIPDTLYQELYDYVNHRLSHDLSDEARALLPNVITKEVSHEIIKDRRFTSDKFFFHVPITLNYQAANSPSKFNQRVNAYLKEHPETPIIGIDRGERNLIYITVIDSTGKILEQRSLNTIQQFDYQKKLDNREKERVAARQAWSVVGTIKDLKQGYLSQVIHEIVDLMIHYQAVVVLENLNFGFKSKRTGIAEKAVYQQFEKMLIDKLNCLVLKDYPAEKVGGVLNPYQLTDQFTSFAKMGTQSGFLFYVPAPYTSKIDPLTGFVDPFVWKTIKNHESRKHFLEGFDFLHYDVKTGDFILHFKMNRNLSFQRGLPGFMPAWDIVFEKNETQFDAKGTPFIAGKRIVPVIENHRFTGRYRDLYPANELIALLEEKGIVFRDGSNILPKLLENDDSHAIDTMVALIRSVLQMRNSNAATGEDYINSPVRDLNGVCFDSRFQNPEWPMDADANGAYHIALKGQLLLNHLKESKDLKLQNGISNQDWLAYIQELRNGPKKKRKVG

SEQ ID NO: 1037 - protein, 1332 aa, Artificial Sequence
  AsCpf1 S542R/K548V/N552R (AsCpf1 RVR)
MKHHHHHHMPKKKRKVMTQFEGFTNLYQVSKTLRFELIPQGKTLKHIQEQGFIEEDKARNDHYKELKPIIDRIYKTYADQCLQLVQLDWENLSAAIDSYRKEKTEETRNALIEEQATYRNAIHDYFIGRTDNLTDAINKRHAEIYKGLFKAELFNGKVLKQLGTVTTTEHENALLRSFDKFTTYFSGFYENRKNVFSAEDISTAIPHRIVQDNFPKFKENCHIFTRLITAVPSLREHFENVKKAIGIFVSTSIEEVFSFPFYNQLLTQTQIDLYNQLLGGISREAGTEKIKGLNEVLNLAIQKNDETAHIIASLPHRFIPLFKQILSDRNTLSFILEEFKSDEEVIQSFCKYKTLLRNENVLETAEALFNELNSIDLTHIFISHKKLETISSALCDHWDTLRNALYERRISELTGKITKSAKEKVQRSLKHEDINLQEIISAAGKELSEAFKQKTSEILSHAHAALDQPLPTTLKKQEEKEILKSQLDSLLGLYHLLDWFAVDESNEVDPEFSARLTGIKLEMEPSLSFYNKARNYATKKPYSVEKFKLNFQMPTLARGWDVNVEKNRGAILFVKNGLYYLGIMPKQKGRYKALSFEPTEKTSEGFDKMYYDYFPDAAKMIPKCSTQLKAVTAHFQTHTTPILLSNNFIEPLEITKEIYDLNNPEKEPKKFQTAYAKKTGDQKGYREALCKWIDFTRDFLSKYTKTTSIDLSSLRPSSQYKDLGEYYAELNPLLYHISFQRIAEKEIMDAVETGKLYLFQIYNKDFAKGHHGKPNLHTLYWTGLFSPENLAKTSIKLNGQAELFYRPKSRMKRMAHRLGEKMLNKKLKDQKTPIPDTLYQELYDYVNHRLSHDLSDEARALLPNVITKEVSHEIIKDRRFTSDKFFFHVPITLNYQAANSPSKFNQRVNAYLKEHPETPIIGIDRGERNLIYITVIDSTGKILEQRSLNTIQQFDYQKKLDNREKERVAARQAWSVVGTIKDLKQGYLSQVIHEIVDLMIHYQAVVVLENLNFGFKSKRTGIAEKAVYQQFEKMLIDKLNCLVLKDYPAEKVGGVLNPYQLTDQFTSFAKMGTQSGFLFYVPAPYTSKIDPLTGFVDPFVWKTIKNHESRKHFLEGFDFLHYDVKTGDFILHFKMNRNLSFQRGLPGFMPAWDIVFEKNETQFDAKGTPFIAGKRIVPVIENHRFTGRYRDLYPANELIALLEEKGIVFRDGSNILPKLLENDDSHAIDTMVALIRSVLQMRNSNAATGEDYINSPVRDLNGVCFDSRFQNPEWPMDADANGAYHIALKGQLLLNHLKESKDLKLQNGISNQDWLAYIQELRNGPKKKRKVG

SEQ ID NO: 1038 - protein, 1334 aa, Artificial Sequence
  His-AsCpf1-2xNLS-S542R/K607R/H800A (AsCpf1 RR-H800A)
MGHHHHHHGSTQFEGFTNLYQVSKTLRFELIPQGKTLKHIQEQGFIEEDKARNDHYKELKPIIDRIYKTYADQCLQLVQLDWENLSAAIDSYRKEKTEETRNALIEEQATYRNAIHDYFIGRTDNLTDAINKRHAEIYKGLFKAELFNGKVLKQLGTVTTTEHENALLRSFDKFTTYFSGFYENRKNVFSAEDISTAIPHRIVQDNFPKFKENCHIFTRLITAVPSLREHFENVKKAIGIFVSTSIEEVFSFPFYNQLLTQTQIDLYNQLLGGISREAGTEKIKGLNEVLNLAIQKNDETAHIIASLPHRFIPLFKQILSDRNTLSFILEEFKSDEEVIQSFCKYKTLLRNENVLETAEALFNELNSIDLTHIFISHKKLETISSALCDHWDTLRNALYERRISELTGKITKSAKEKVQRSLKHEDINLQEIISAAGKELSEAFKQKTSEILSHAHAALDQPLPTTLKKQEEKEILKSQLDSLLGLYHLLDWFAVDESNEVDPEFSARLTGIKLEMEPSLSFYNKARNYATKKPYSVEKFKLNFQMPTLARGWDVNKEKNNGAILFVKNGLYYLGIMPKQKGRYKALSFEPTEKTSEGFDKMYYDYFPDAAKMIPRCSTQLKAVTAHFQTHTTPILLSNNFIEPLEITKEIYDLNNPEKEPKKFQTAYAKKTGDQKGYREALCKWIDFTRDFLSKYTKTTSIDLSSLRPSSQYKDLGEYYAELNPLLYHISFQRIAEKEIMDAVETGKLYLFQIYNKDFAKGHHGKPNLHTLYWTGLFSPENLAKTSIKLNGQAELFYRPKSRMKRMAARLGEKMLNKKLKDQKTPIPDTLYQELYDYVNHRLSHDLSDEARALLPNVITKEVSHEIIKDRRFTSDKFFFHVPITLNYQAANSPSKFNQRVNAYLKEHPETPIIGIDRGERNLIYITVIDSTGKILEQRSLNTIQQFDYQKKLDNREKERVAARQAWSVVGTIKDLKQGYLSQVIHEIVDLMIHYQAVVVLENLNFGFKSKRTGIAEKAVYQQFEKMLIDKLNCLVLKDYPAEKVGGVLNPYQLTDQFTSFAKMGTQSGFLFYVPAPYTSKIDPLTGFVDPFVWKTIKNHESRKHFLEGFDFLHYDVKTGDFILHFKMNRNLSFQRGLPGFMPAWDIVFEKNETQFDAKGTPFIAGKRIVPVIENHRFTGRYRDLYPANELIALLEEKGIVFRDGSNILPKLLENDDSHAIDTMVALIRSVLQMRNSNAATGEDYINSPVRDLNGVCFDSRFQNPEWPMDADANGAYHIALKGQLLLNHLKESKDLKLQNGISNQDWLAYIQELRNGSPKKKRKVGSPKKKRKV

SEQ ID NO: 1039 - protein, 1334 aa, Artificial Sequence
  His-AsCpf1-2xNLS-S542R-K548V-N552R-H800A (Cpf1 RVR H800A)
MGHHHHHHGSTQFEGFTNLYQVSKTLRFELIPQGKTLKHIQEQGFIEEDKARNDHYKELKPIIDRIYKTYADQCLQLVQLDWENLSAAIDSYRKEKTEETRNALIEEQATYRNAIHDYFIGRTDNLTDAINKRHAEIYKGLFKAELFNGKVLKQLGTVTTTEHENALLRSFDKFTTYFSGFYENRKNVFSAEDISTAIPHRIVQDNFPKFKENCHIFTRLITAVPSLREHFENVKKAIGIFVSTSIEEVFSFPFYNQLLTQTQIDLYNQLLGGISREAGTEKIKGLNEVLNLAIQKNDETAHIIASLPHRFIPLFKQILSDRNTLSFILEEFKSDEEVIQSFCKYKTLLRNENVLETAEALFNELNSIDLTHIFISHKKLETISSALCDHWDTLRNALYERRISELTGKITKSAKEKVQRSLKHEDINLQEIISAAGKELSEAFKQKTSEILSHAHAALDQPLPTTLKKQEEKEILKSQLDSLLGLYHLLDWFAVDESNEVDPEFSARLTGIKLEMEPSLSFYNKARNYATKKPYSVEKFKLNFQMPTLARGWDVNVEKNRGAILFVKNGLYYLGIMPKQKGRYKALSFEPTEKTSEGFDKMYYDYFPDAAKMIPKCSTQLKAVTAHFQTHTTPILLSNNFIEPLEITKEIYDLNNPEKEPKKFQTAYAKKTGDQKGYREALCKWIDFTRDFLSKYTKTTSIDLSSLRPSSQYKDLGEYYAELNPLLYHISFQRIAEKEIMDAVETGKLYLFQIYNKDFAKGHHGKPNLHTLYWTGLFSPENLAKTSIKLNGQAELFYRPKSRMKRMAARLGEKMLNKKLKDQKTPIPDTLYQELYDYVNHRLSHDLSDEARALLPNVITKEVSHEIIKDRRFTSDKFFFHVPITLNYQAANSPSKFNQRVNAYLKEHPETPIIGIDRGERNLIYITVIDSTGKILEQRSLNTIQQFDYQKKLDNREKERVAARQAWSVVGTIKDLKQGYLSQVIHEIVDLMIHYQAVVVLENLNFGFKSKRTGIAEKAVYQQFEKMLIDKLNCLVLKDYPAEKVGGVLNPYQLTDQFTSFAKMGTQSGFLFYVPAPYTSKIDPLTGFVDPFVWKTIKNHESRKHFLEGFDFLHYDVKTGDFILHFKMNRNLSFQRGLPGFMPAWDIVFEKNETQFDAKGTPFIAGKRIVPVIENHRFTGRYRDLYPANELIALLEEKGIVFRDGSNILPKLLENDDSHAIDTMVALIRSVLQMRNSNAATGEDYINSPVRDLNGVCFDSRFQNPEWPMDADANGAYHIALKGQLLLNHLKESKDLKLQNGISNQDWLAYIQELRNGSPKKKRKVGSPKKKRKV

SEQ ID NO: 1040 - DNA, 100 bp, Artificial Sequence
  Ptx ssODN 18nt - positive strand (OLI16431)
  misc_feature (1)..(2): Linked by phosphorothioate (PS) bond
  misc_feature (99)..(100): Linked by phosphorothioate (PS) bond
ccctggcctcactggatactctaagactattggtcaagtttgccttgtcaaggctggccaacccatgggtggagtttagccagggaccgtttcagacaga

SEQ ID NO: 1041 - RNA, 40 nt, Artificial Sequence; identical to SEQ ID NO: 1022
  gRNA
  misc_feature (39)..(39): Modified to contain 2'-O-methyl
  misc_feature (39)..(40): Linked by phosphorodithioate (PS2) bond
  misc_feature (40)..(40): Modified to contain 2'-O-methyl

SEQ ID NO: 1042 - RNA, 45 nt, Artificial Sequence
  gRNA
cuuuuuaauuucuacucuuguagauccuugucaaggcuauugguc

SEQ ID NO: 1043 - RNA, 50 nt, Artificial Sequence
  gRNA
aagaccuuuuuaauuucuacucuuguagauccuugucaaggcuauugguc

SEQ ID NO: 1044 - RNA, 65 nt, Artificial Sequence
  gRNA
auguguuuuugucaaaagaccuuuuuaauuucuacucuuguagauccuugucaaggcuauugguc

SEQ ID NO: 1045 - RNA, 100 nt, Artificial Sequence
  gRNA
aggccagcuugccgguuuuuuagucgugcugcuucauguguuuuugucaaaagaccuuuuuaauuucuacucuuguagauccuugucaaggcuauugguc

SEQ ID NO: 1046 - DNA, 45 bp, Artificial Sequence
  gRNA
  misc_feature (1)..(5): DNA nucleotides
  misc_feature (6)..(45): RNA nucleotides
cttttuaauuucuacucuuguagauccuugucaaggcuauugguc

SEQ ID NO: 1047 - DNA, 50 bp, Artificial Sequence
  gRNA
  misc_feature (1)..(10): DNA nucleotides
  misc_feature (11)..(50): RNA nucleotides
aagaccttttuaauuucuacucuuguagauccuugucaaggcuauugguc

SEQ ID NO: 1048 - DNA, 65 bp, Artificial Sequence
  gRNA
  misc_feature (1)..(25): DNA nucleotides
  misc_feature (26)..(65): RNA nucleotides
atgtgtttttgtcaaaagaccttttuaauuucuacucuuguagauccuugucaaggcuauugguc

SEQ ID NO: 1049 - DNA, 100 bp, Artificial Sequence
  gRNA
  misc_feature (1)..(60): DNA nucleotides
  misc_feature (61)..(100): RNA nucleotides
aggccagcttgccggttttttagtcgtgctgcttcatgtgtttttgtcaaaagaccttttuaauuucuacucuuguagauccuugucaaggcuauugguc

SEQ ID NO: 1050 - DNA, 66 bp, Artificial Sequence
  gRNA
  misc_feature (1)..(25): DNA nucleotides
  misc_feature (26)..(66): RNA nucleotides
  misc_feature (65)..(65): Modified to contain 2'-O-methyl
  misc_feature (65)..(66): Linked by phosphorodithioate (PS2) bond
  misc_feature (66)..(66): Modified to contain 2'-O-methyl
atgtgtttttgtcaaaagaccttttuaauuucuacucuuguagauccuugucaaggcuauugguca

SEQ ID NO: 1051 - DNA, 66 bp, Artificial Sequence; identical to SEQ ID NO: 1050
  gRNA
  misc_feature (1)..(25): DNA nucleotides
  misc_feature (26)..(66): RNA nucleotides
  misc_feature (65)..(66): Linked by phosphorothioate (PS) bond
  misc_feature (66)..(66): Modified to contain 2'-O-methyl

SEQ ID NO: 1052 - DNA, 60 bp, Artificial Sequence
  gRNA
  misc_feature (1)..(20): DNA nucleotides
  misc_feature (21)..(60): RNA nucleotides
tttttgtcaaaagaccttttuaauuucuacucuuguagauccuugucaaggcuauugguc

SEQ ID NO: 1053 - DNA, 70 bp, Artificial Sequence
  gRNA
  misc_feature (1)..(30): DNA nucleotides
  misc_feature (31)..(70): RNA nucleotides
gcttcatgtgtttttgtcaaaagaccttttuaauuucuacucuuguagauccuugucaaggcuauugguc

SEQ ID NO: 1054 - DNA, 90 bp, Artificial Sequence
  gRNA
  misc_feature (1)..(50): DNA nucleotides
  misc_feature (51)..(90): RNA nucleotides
gccggttttttagtcgtgctgcttcatgtgtttttgtcaaaagaccttttuaauuucuacucuuguagauccuugucaaggcuauugguc

SEQ ID NO: 1055 - DNA, 80 bp, Artificial Sequence
  gRNA
  misc_feature (1)..(40): DNA nucleotides
  misc_feature (41)..(80): RNA nucleotides
tagtcgtgctgcttcatgtgtttttgtcaaaagaccttttuaauuucuacucuuguagauccuugucaaggcuauugguc

SEQ ID NO: 1056 - DNA, 60 bp, Artificial Sequence
  gRNA
  misc_feature (1)..(20): DNA nucleotides
  misc_feature (1)..(2): Linked by phosphorothioate (PS) bond
  misc_feature (2)..(3): Linked by phosphorothioate (PS) bond
  misc_feature (21)..(60): RNA nucleotides
ccgaagttttcttcggttttuaauuucuacucuuguagauccuugucaaggcuauugguc

SEQ ID NO: 1057 - DNA, 65 bp, Artificial Sequence
  gRNA
  misc_feature (1)..(25): DNA nucleotides
  misc_feature (1)..(2): Linked by phosphorothioate (PS) bond
  misc_feature (2)..(3): Linked by phosphorothioate (PS) bond
  misc_feature (26)..(65): RNA nucleotides
tttttccgaagttttcttcggttttuaauuucuacucuuguagauccuugucaaggcuauugguc

SEQ ID NO: 1058 - DNA, 70 bp, Artificial Sequence
  gRNA
  misc_feature (1)..(30): DNA nucleotides
  misc_feature (1)..(2): Linked by phosphorothioate (PS) bond
  misc_feature (2)..(3): Linked by phosphorothioate (PS) bond
  misc_feature (31)..(70): RNA nucleotides
aacgctttttccgaagttttcttcggttttuaauuucuacucuuguagauccuugucaaggcuauugguc

SEQ ID NO: 1059 - DNA, 81 bp, Artificial Sequence
  gRNA
  misc_feature (1)..(41): DNA nucleotides
  misc_feature (1)..(2): Linked by phosphorothioate (PS) bond
  misc_feature (2)..(3): Linked by phosphorothioate (PS) bond
  misc_feature (42)..(81): RNA nucleotides
gcgttgttttcaacgctttttccgaagttttcttcggttttuaauuucuacucuuguagauccuugucaaggcuauugguc

SEQ ID NO: 1060 - DNA, 102 bp, Artificial Sequence
  gRNA
  misc_feature (1)..(62): DNA nucleotides
  misc_feature (1)..(2): Linked by phosphorothioate (PS) bond
  misc_feature (2)..(3): Linked by phosphorothioate (PS) bond
  misc_feature (63)..(102): RNA nucleotides
ggcttcttttgaagcctttttgcgttgttttcaacgctttttccgaagttttcttcggttttuaauuucuacucuuguagauccuugucaaggcuauugguc

SEQ ID NO: 1061 - RNA, 40 nt, Artificial Sequence; identical to SEQ ID NO: 1022
  gRNA
  misc_feature (1)..(1): Modified to contain 2'-O-methyl

SEQ ID NO: 1062 - RNA, 40 nt, Artificial Sequence; identical to SEQ ID NO: 1022
  gRNA
  misc_feature (1)..(1): Modified to contain 2'-O-methyl
  misc_feature (1)..(2): Linked by phosphorothioate (PS) bond

SEQ ID NO: 1063 - RNA, 40 nt, Artificial Sequence; identical to SEQ ID NO: 1022
  gRNA
  misc_feature (1)..(1): Modified to contain 2'-O-methyl
  misc_feature (2)..(2): Modified to contain 2'-O-methyl

SEQ ID NO: 1064 - RNA, 40 nt, Artificial Sequence; identical to SEQ ID NO: 1022
  gRNA
  misc_feature (1)..(1): Modified to contain 2'-O-methyl
  misc_feature (1)..(2): Linked by phosphorothioate (PS) bond
  misc_feature (2)..(2): Modified to contain 2'-O-methyl

SEQ ID NO: 1065 - RNA, 40 nt, Artificial Sequence; identical to SEQ ID NO: 1022
  gRNA
  misc_feature (1)..(1): Modified to contain 2'-O-methyl
  misc_feature (2)..(2): Modified to contain 2'-O-methyl
  misc_feature (3)..(3): Modified to contain 2'-O-methyl

SEQ ID NO: 1066 - RNA, 40 nt, Artificial Sequence; identical to SEQ ID NO: 1022
  gRNA
  misc_feature (1)..(1): Modified to contain 2'-O-methyl
  misc_feature (1)..(2): Linked by phosphorothioate (PS) bond
  misc_feature (2)..(3): Linked by phosphorothioate (PS) bond
  misc_feature (2)..(2): Modified to contain 2'-O-methyl
  misc_feature (3)..(4): Linked by phosphorothioate (PS) bond
  misc_feature (3)..(3): Modified to contain 2'-O-methyl

SEQ ID NO: 1067 - DNA, 65 bp, Artificial Sequence; identical to SEQ ID NO: 1048
  gRNA
  misc_feature (1)..(25): DNA nucleotides
  misc_feature (1)..(2): Linked by phosphorothioate (PS) bond
  misc_feature (2)..(3): Linked by phosphorothioate (PS) bond
  misc_feature (26)..(65): RNA nucleotides

SEQ ID NO: 1068 - DNA, 66 bp, Artificial Sequence; identical to SEQ ID NO: 1050
  gRNA
  misc_feature (1)..(25): DNA nucleotides
  misc_feature (1)..(2): Linked by phosphorothioate (PS) bond
  misc_feature (2)..(3): Linked by phosphorothioate (PS) bond
  misc_feature (26)..(66): RNA nucleotides
  misc_feature (65)..(66): Linked by phosphorothioate (PS) bond
  misc_feature (66)..(66): Modified to contain 2'-O-methyl

SEQ ID NO: 1069 - RNA, 41 nt, Artificial Sequence; identical to SEQ ID NO: 1023
  gRNA
  misc_feature (40)..(41): Linked by phosphorothioate (PS) bond
  misc_feature (41)..(41): Modified to contain 2'-O-methyl

SEQ ID NO: 1070 - RNA, 42 nt, Artificial Sequence
  gRNA
  misc_feature (41)..(41): Modified to contain 2'-O-methyl
  misc_feature (41)..(42): Linked by phosphorothioate (PS) bond
uaauuucuacucuuguagauccuugucaaggcuauuggucau

SEQ ID NO: 1071 - RNA, 41 nt, Artificial Sequence
  gRNA
uaauuucuacucuuguagauccuugucaaggcuauuggucu

SEQ ID NO: 1072 - RNA, 42 nt, Artificial Sequence; identical to SEQ ID NO: 1070
  gRNA

SEQ ID NO: 1073 - RNA, 44 nt, Artificial Sequence
  gRNA
uaauuucuacucuuguagauccuugucaaggcuauuggucaagu

SEQ ID NO: 1074 - DNA, 66 bp, Artificial Sequence
  gRNA
  misc_feature (1)..(25): DNA nucleotides
  misc_feature (1)..(2): Linked by phosphorothioate (PS) bond
  misc_feature (2)..(3): Linked by phosphorothioate (PS) bond
  misc_feature (26)..(66): RNA nucleotides
atgtgtttttgtcaaaagaccttttuaauuucuacucuuguagauccuugucaaggcuauuggucu

SEQ ID NO: 1075 - DNA, 69 bp, Artificial Sequence
  gRNA
  misc_feature (1)..(25): DNA nucleotides
  misc_feature (1)..(2): Linked by phosphorothioate (PS) bond
  misc_feature (2)..(3): Linked by phosphorothioate (PS) bond
  misc_feature (26)..(69): RNA nucleotides
atgtgtttttgtcaaaagaccttttuaauuucuacucuuguagauccuugucaaggcuauuggucaagu

SEQ ID NO: 1076 - RNA, 41 nt, Artificial Sequence; identical to SEQ ID NO: 1023
  gRNA

SEQ ID NO: 1077 - RNA, 43 nt, Artificial Sequence
  gRNA
uaauuucuacucuuguagauccuugucaaggcuauuggucaag

SEQ ID NO: 1078 - DNA, 68 bp, Artificial Sequence
  gRNA
  misc_feature (1)..(25): DNA nucleotides
  misc_feature (1)..(2): Linked by phosphorothioate (PS) bond
  misc_feature (2)..(3): Linked by phosphorothioate (PS) bond
  misc_feature (26)..(68): RNA nucleotides
atgtgtttttgtcaaaagaccttttuaauuucuacucuuguagauccuugucaaggcuauuggucaag

SEQ ID NO: 1079 - RNA, 44 nt, Artificial Sequence
  gRNA
uaauuucuacucuuguagauccuugucaaggcuauuggucuuuu

SEQ ID NO: 1080 - RNA, 44 nt, Artificial Sequence; identical to SEQ ID NO: 1079
  gRNA
  misc_feature (41)..(41): Modified to contain 2'-O-methyl
  misc_feature (41)..(42): Linked by phosphorothioate (PS) bond
  misc_feature (42)..(43): Linked by phosphorothioate (PS) bond
  misc_feature (42)..(42): Modified to contain 2'-O-methyl
  misc_feature (43)..(43): Modified to contain 2'-O-methyl
  misc_feature (43)..(44): Linked by phosphorothioate (PS) bond

SEQ ID NO: 1081 - DNA, 69 bp, Artificial Sequence
  gRNA
  misc_feature (1)..(25): DNA nucleotides
  misc_feature (1)..(2): Linked by phosphorothioate (PS) bond
  misc_feature (2)..(3): Linked by phosphorothioate (PS) bond
  misc_feature (26)..(69): RNA nucleotides
atgtgtttttgtcaaaagaccttttuaauuucuacucuuguagauccuugucaaggcuauuggucuuuu

SEQ ID NO: 1082 - DNA, 66 bp, Artificial Sequence
  gRNA
  misc_feature (1)..(25): DNA nucleotides
  misc_feature (26)..(66): RNA nucleotides
  misc_feature (65)..(66): Linked by phosphorothioate (PS) bond
  misc_feature (66)..(66): Modified to contain 2'-O-methyl
aaaaaaaaaaaaaaaaaaaaaaaaauaauuucuacucuuguagauccuugucaaggcuauugguca

SEQ ID NO: 1083 - DNA, 66 bp, Artificial Sequence
  gRNA
  misc_feature (1)..(25): DNA nucleotides
  misc_feature (26)..(66): RNA nucleotides
  misc_feature (65)..(66): Linked by phosphorothioate (PS) bond
  misc_feature (66)..(66): Modified to contain 2'-O-methyl
tttttttttttttttttttttttttuaauuucuacucuuguagauccuugucaaggcuauugguca

SEQ ID NO: 1084 - DNA, 61 bp, Artificial Sequence
  gRNA
  misc_feature (1)..(20): DNA nucleotides
  misc_feature (1)..(2): Linked by phosphorothioate (PS) bond
  misc_feature (2)..(3): Linked by phosphorothioate (PS) bond
  misc_feature (21)..(61): RNA nucleotides
  misc_feature (60)..(61): Linked by phosphorothioate (PS) bond
  misc_feature (61)..(61): Modified to contain 2'-O-methyl
ccgaagttttcttcggttttuaauuucuacucuuguagauccuugucaaggcuauugguca

SEQ ID NO: 1085 - RNA, 41 nt, Artificial Sequence
  gRNA
  misc_feature (40)..(41): Linked by phosphorothioate (PS) bond
  misc_feature (41)..(41): Modified to contain 2'-O-methyl
uaauuucuacucuuguagauagacagauauuugcauugaga

SEQ ID NO: 1086 - DNA, 66 bp, Artificial Sequence
  gRNA
  misc_feature (1)..(25): DNA nucleotides
  misc_feature (26)..(66): RNA nucleotides
  misc_feature (65)..(66): Linked by phosphorothioate (PS) bond
  misc_feature (66)..(66): Modified to contain 2'-O-methyl
atgtgtttttgtcaaaagaccttttuaauuucuacucuuguagauagacagauauuugcauugaga

SEQ ID NO: 1087 - DNA, 61 bp, Artificial Sequence
  gRNA
  misc_feature (1)..(20): DNA nucleotides
  misc_feature (1)..(2): Linked by phosphorothioate (PS) bond
  misc_feature (2)..(3): Linked by phosphorothioate (PS) bond
  misc_feature (21)..(61): RNA nucleotides
  misc_feature (60)..(61): Linked by phosphorothioate (PS) bond
  misc_feature (61)..(61): Modified to contain 2'-O-methyl
ccgaagttttcttcggttttuaauuucuacucuuguagauagacagauauuugcauugaga

SEQ ID NO: 1088 - RNA, 41 nt, Artificial Sequence
  gRNA
  misc_feature (40)..(41): Linked by phosphorothioate (PS) bond
  misc_feature (41)..(41): Modified to contain 2'-O-methyl
uaauuucuacucuuguagaucauugagauaguguggggaag

SEQ ID NO: 1089 - DNA, 66 bp, Artificial Sequence
  gRNA
  misc_feature (1)..(25): DNA nucleotides
  misc_feature (26)..(66): RNA nucleotides
  misc_feature (65)..(66): Linked by phosphorothioate (PS) bond
  misc_feature (66)..(66): Modified to contain 2'-O-methyl
atgtgtttttgtcaaaagaccttttuaauuucuacucuuguagaucauugagauaguguggggaag

SEQ ID NO: 1090 - DNA, 61 bp, Artificial Sequence
  gRNA
  misc_feature (1)..(20): DNA nucleotides
  misc_feature (1)..(2): Linked by phosphorothioate (PS) bond
  misc_feature (2)..(3): Linked by phosphorothioate (PS) bond
  misc_feature (21)..(61): RNA nucleotides
  misc_feature (60)..(61): Linked by phosphorothioate (PS) bond
  misc_feature (61)..(61): Modified to contain 2'-O-methyl
ccgaagttttcttcggttttuaauuucuacucuuguagaucauugagauaguguggggaag

SEQ ID NO: 1091 - RNA, 41 nt, Artificial Sequence
  gRNA
  misc_feature (40)..(41): Linked by phosphorothioate (PS) bond
  misc_feature (41)..(41): Modified to contain 2'-O-methyl
uaauuucuacucuuguagaucuucucccaucauagaggaua

SEQ ID NO: 1092 - DNA, 66 bp, Artificial Sequence
  gRNA
  misc_feature (1)..(25): DNA nucleotides
  misc_feature (26)..(66): RNA nucleotides
  misc_feature (65)..(66): Linked by phosphorothioate (PS) bond
  misc_feature (66)..(66): Modified to contain 2'-O-methyl
atgtgtttttgtcaaaagaccttttuaauuucuacucuuguagaucuucucccaucauagaggaua

SEQ ID NO: 1093 - DNA, 61 bp, Artificial Sequence
  gRNA
  misc_feature (1)..(20): DNA nucleotides
  misc_feature (1)..(2): Linked by phosphorothioate (PS) bond
  misc_feature (2)..(3): Linked by phosphorothioate (PS) bond
  misc_feature (21)..(61): RNA nucleotides
  misc_feature (60)..(61): Linked by phosphorothioate (PS) bond
  misc_feature (61)..(61): Modified to contain 2'-O-methyl
ccgaagttttcttcggttttuaauuucuacucuuguagaucuucucccaucauagaggaua

SEQ ID NO: 1094 - protein, 1363 aa, Artificial Sequence
  Cpf1
  MISC_FEATURE (1310)..(1331): NLS
  MISC_FEATURE (1358)..(1363): His tag
MTQFEGFTNLYQVSKTLRFELIPQGKTLKHIQEQGFIEEDKARNDHYKELKPIIDRIYKTYADQCLQLVQLDWENLSAAIDSYRKEKTEETRNALIEEQATYRNAIHDYFIGRTDNLTDAINKRHAEIYKGLFKAELFNGKVLKQLGTVTTTEHENALLRSFDKFTTYFSGFYENRKNVFSAEDISTAIPHRIVQDNFPKFKENCHIFTRLITAVPSLREHFENVKKAIGIFVSTSIEEVFSFPFYNQLLTQTQIDLYNQLLGGISREAGTEKIKGLNEVLNLAIQKNDETAHIIASLPHRFIPLFKQILSDRNTLSFILEEFKSDEEVIQSFCKYKTLLRNENVLETAEALFNELNSIDLTHIFISHKKLETISSALCDHWDTLRNALYERRISELTGKITKSAKEKVQRSLKHEDINLQEIISAAGKELSEAFKQKTSEILSHAHAALDQPLPTTLKKQEEKEILKSQLDSLLGLYHLLDWFAVDESNEVDPEFSARLTGIKLEMEPSLSFYNKARNYATKKPYSVEKFKLNFQRPTLASGWDVNKEKNNGAILFVKNGLYYLGIMPKQKGRYKALSFEPTEKTSEGFDKMYYDYFPDAAKMIPKCSTQLKAVTAHFQTHTTPILLSNNFIEPLEITKEIYDLNNPEKEPKKFQTAYAKKTGDQKGYREALCKWIDFTRDFLSKYTKTTSIDLSSLRPSSQYKDLGEYYAELNPLLYHISFQRIAEKEIMDAVETGKLYLFQIYNKDFAKGHHGKPNLHTLYWTGLFSPENLAKTSIKLNGQAELFYRPKSRMKRMAHRLGEKMLNKKLKDQKTPIPDTLYQELYDYVNHRLSHDLSDEARALLPNVITKEVSHEIIKDRRFTSDKFLFHVPITLNYQAANSPSKFNQRVNAYLKEHPETPIIGIDRGERNLIYITVIDSTGKILEQRSLNTIQQFDYQKKLDNREKERVAARQAWSVVGTIKDLKQGYLSQVIHEIVDLMIHYQAVVVLENLNFGFKSKRTGIAEKAVYQQFEKMLIDKLNCLVLKDYPAEKVGGVLNPYQLTDQFTSFAKMGTQSGFLFYVPAPYTSKIDPLTGFVDPFVWKTIKNHESRKHFLEGFDFLHYDVKTGDFILHFKMNRNLSFQRGLPGFMPAWDIVFEKNETQFDAKGTPFIAGKRIVPVIENHRFTGRYRDLYPANELIALLEEKGIVFRDGSNILPKLLENDDSHAIDTMVALIRSVLQMRNSNAATGEDYINSPVRDLNGVCFDSRFQNPEWPMDADANGAYHIALKGQLLLNHLKESKDLKLQNGISNQDWLAYIQELRNGRSSDDEATADSQHAAPPKKKRKVGGSGGSGGSGGSGGSGGSGGSGGSLEHHHHHH

SEQ ID NO: 1095 - protein, 1363 aa, Artificial Sequence
  Cpf1
  MISC_FEATURE (1310)..(1331): NLS
  MISC_FEATURE (1358)..(1363): His tag
MTQFEGFTNLYQVSKTLRFELIPQGKTLKHIQEQGFIEEDKARNDHYKELKPIIDRIYKTYADQCLQLVQLDWENLSAAIDSYRKEKTEETRNALIEEQATYRNAIHDYFIGRTDNLTDAINKRHAEIYKGLFKAELFNGKVLKQLGTVTTTEHENALLRSFDKFTTYFSGFYENRKNVFSAEDISTAIPHRIVQDNFPKFKENCHIFTRLITAVPSLREHFENVKKAIGIFVSTSIEEVFSFPFYNQLLTQTQIDLYNQLLGGISREAGTEKIKGLNEVLNLAIQKNDETAHIIASLPHRFIPLFKQILSDRNTLSFILEEFKSDEEVIQSFCKYKTLLRNENVLETAEALFNELNSIDLTHIFISHKKLETISSALCDHWDTLRNALYERRISELTGKITKSAKEKVQRSLKHEDINLQEIISAAGKELSEAFKQKTSEILSHAHAALDQPLPTTLKKQEEKEILKSQLDSLLGLYHLLDWFAVDESNEVDPEFSARLTGIKLEMEPSLSFYNKARNYATKKPYSVEKFKLNFQMPTLASGWDVNKEKNNGAILFVKNGLYYLGIMPKQKGRYKALSFEPTEKTSEGFDKMYYDYFPDAAKMIPKCSTQLKAVTAHFQTHTTPILLSNNFIEPLEITKEIYDLNNPEKEPKKFQTAYAKKTGDQKGYREALCKWIDFTRDFLSKYTKTTSIDLSSLRPSSQYKDLGEYYAELNPLLYHISFQRIAEKEIMDAVETGKLYLFQIYNKDFAKGHHGKPNLHTLYWTGLFSPENLAKTSIKLNGQAELFYRPKSRMKRMAHRLGEKMLNKKLKDQKTPIPDTLYQELYDYVNHRLSHDLSDEARALLPNVITKEVSHEIIKDRRFTSDKFFFHVPITLNYQAANSPSKFNQRVNAYLKEHPETPIIGIDRGERNLIYITVIDSTGKILEQRSLNTIQQFDYQKKLDNREKERVAARQAWSVVGTIKDLKQGYLSQVIHEIVDLMIHYQAVVVLENLNFGFKSKRTGIAEKAVYQQFEKMLIDKLNCLVLKDYPAEKVGGVLNPYQLTDQFTSFAKMGTQSGFLFYVPAPYTSKIDPLTGFVDPFVWKTIKNHESRKHFLEGFDFLHYDVKTGDFILHFKMNRNLSFQRGLPGFMPAWDIVFEKNETQFDAKGTPFIAGKRIVPVIENHRFTGRYRDLYPANELIALLEEKGIVFRDGSNILPKLLENDDSHAIDTMVALIRSVLQMRNSNAATGEDYINSPVRDLNGVCFDSRFQNPEWPMDADANGAYHIALKGQLLLNHLKESKDLKLQNGISNQDWLAYIQELRNGRSSDDEATADSQHAAPPKKKRKVGGSGGSGGSGGSGGSGGSGGSGGSLEHHHHHH

SEQ ID NO: 1096 - protein, 1363 aa, Artificial Sequence
  Cpf1
  MISC_FEATURE (1310)..(1331): NLS
  MISC_FEATURE (1358)..(1363): His tag
MTQFEGFTNLYQVSKTLRFELIPQGKTLKHIQEQGFIEEDKARNDHYKELKPIIDRIYKTYADQCLQLVQLDWENLSAAIDSYRKEKTEETRNALIEEQATYRNAIHDYFIGRTDNLTDAINKRHAEIYKGLFKAELFNGKVLKQLGTVTTTEHENALLRSFDKFTTYFSGFYENRKNVFSAEDISTAIPHRIVQDNFPKFKENCHIFTRLITAVPSLREHFENVKKAIGIFVSTSIEEVFSFPFYNQLLTQTQIDLYNQLLGGISREAGTEKIKGLNEVLNLAIQKNDETAHIIASLPHRFIPLFKQILSDRNTLSFILEEFKSDEEVIQSFCKYKTLLRNENVLETAEALFNELNSIDLTHIFISHKKLETISSALCDHWDTLRNALYERRISELTGKITKSAKEKVQRSLKHEDINLQEIISAAGKELSEAFKQKTSEILSHAHAALDQPLPTTLKKQEEKEILKSQLDSLLGLYHLLDWFAVDESNEVDPEFSARLTGIKLEMEPSLSFYNKARNYATKKPYSVEKFKLNFQRPTLASGWDVNKEKNNGAILFVKNGLYYLGIMPKQKGRYKALSFEPTEKTSEGFDKMYYDYFPDAAKMIPKCSTQLKAVTAHFQTHTTPILLSNNFIEPLEITKEIYDLNNPEKEPKKFQTAYAKKTGDQKGYREALCKWIDFTRDFLSKYTKTTSIDLSSLRPSSQYKDLGEYYAELNPLLYHISFQRIAEKEIMDAVETGKLYLFQIYNKDFAKGHHGKPNLHTLYWTGLFSPENLAKTSIKLNGQAELFYRPKSRMKRMAARLGEKMLNKKLKDQKTPIPDTLYQELYDYVNHRLSHDLSDEARALLPNVITKEVSHEIIKDRRFTSDKFLFHVPITLNYQAANSPSKFNQRVNAYLKEHPETPIIGIDRGERNLIYITVIDSTGKILEQRSLNTIQQFDYQKKLDNREKERVAARQAWSVVGTIKDLKQGYLSQVIHEIVDLMIHYQAVVVLENLNFGFKSKRTGIAEKAVYQQFEKMLIDKLNCLVLKDYPAEKVGGVLNPYQLTDQFTSFAKMGTQSGFLFYVPAPYTSKIDPLTGFVDPFVWKTIKNHESRKHFLEGFDFLHYDVKTGDFILHFKMNRNLSFQRGLPGFMPAWDIVFEKNETQFDAKGTPFIAGKRIVPVIENHRFTGRYRDLYPANELIALLEEKGIVFRDGSNILPKLLENDDSHAIDTMVALIRSVLQMRNSNAATGEDYINSPVRDLNGVCFDSRFQNPEWPMDADANGAYHIALKGQLLLNHLKESKDLKLQNGISNQDWLAYIQELRNGRSSDDEATADSQHAAPPKKKRKVGGSGGSGGSGGSGGSGGSGGSGGSLEHHHHHH

SEQ ID NO: 1097 - protein, 1331 aa, Artificial Sequence
  Cpf1
  MISC_FEATURE (1310)..(1331): NLS
MTQFEGFTNLYQVSKTLRFELIPQGKTLKHIQEQGFIEEDKARNDHYKELKPIIDRIYKTYADQCLQLVQLDWENLSAAIDSYRKEKTEETRNALIEEQATYRNAIHDYFIGRTDNLTDAINKRHAEIYKGLFKAELFNGKVLKQLGTVTTTEHENALLRSFDKFTTYFSGFYENRKNVFSAEDISTAIPHRIVQDNFPKFKENCHIFTRLITAVPSLREHFENVKKAIGIFVSTSIEEVFSFPFYNQLLTQTQIDLYNQLLGGISREAGTEKIKGLNEVLNLAIQKNDETAHIIASLPHRFIPLFKQILSDRNTLSFILEEFKSDEEVIQSFCKYKTLLRNENVLETAEALFNELNSIDLTHIFISHKKLETISSALCDHWDTLRNALYERRISELTGKITKSAKEKVQRSLKHEDINLQEIISAAGKELSEAFKQKTSEILSHAHAALDQPLPTTLKKQEEKEILKSQLDSLLGLYHLLDWFAVDESNEVDPEFSARLTGIKLEMEPSLSFYNKARNYATKKPYSVEKFKLNFQRPTLASGWDVNKEKNNGAILFVKNGLYYLGIMPKQKGRYKALSFEPTEKTSEGFDKMYYDYFPDAAKMIPKCSTQLKAVTAHFQTHTTPILLSNNFIEPLEITKEIYDLNNPEKEPKKFQTAYAKKTGDQKGYREALCKWIDFTRDFLSKYTKTTSIDLSSLRPSSQYKDLGEYYAELNPLLYHISFQRIAEKEIMDAVETGKLYLFQIYNKDFAKGHHGKPNLHTLYWTGLFSPENLAKTSIKLNGQAELFYRPKSRMKRMAARLGEKMLNKKLKDQKTPIPDTLYQELYDYVNHRLSHDLSDEARALLPNVITKEVSHEIIKDRRFTSDKFLFHVPITLNYQAANSPSKFNQRVNAYLKEHPETPIIGIDRGERNLIYITVIDSTGKILEQRSLNTIQQFDYQKKLDNREKERVAARQAWSVVGTIKDLKQGYLSQVIHEIVDLMIHYQAVVVLENLNFGFKSKRTGIAEKAVYQQFEKMLIDKLNCLVLKDYPAEKVGGVLNPYQLTDQFTSFAKMGTQSGFLFYVPAPYTSKIDPLTGFVDPFVWKTIKNHESRKHFLEGFDFLHYDVKTGDFILHFKMNRNLSFQRGLPGFMPAWDIVFEKNETQFDAKGTPFIAGKRIVPVIENHRFTGRYRDLYPANELIALLEEKGIVFRDGSNILPKLLENDDSHAIDTMVALIRSVLQMRNSNAATGEDYINSPVRDLNGVCFDSRFQNPEWPMDADANGAYHIALKGQLLLNHLKESKDLKLQNGISNQDWLAYIQELRNGRSSDDEATADSQHAAPPKKKRKV

SEQ ID NO: 1098 - DNA, 67 bp, Artificial Sequence
  gRNA
  misc_feature (1)..(25): DNA nucleotides
  misc_feature (1)..(2): Linked by phosphorothioate (PS) bond
  misc_feature (2)..(3): Linked by phosphorothioate (PS) bond
  misc_feature (26)..(67): RNA nucleotides
  misc_feature (66)..(67): Linked by phosphorothioate (PS) bond
  misc_feature (66)..(66): Modified to contain 2'-O-methyl
atgtgtttttgtcaaaagaccttttuaauuucuacucuuguagauccuugucaaggcuauuggucau

SEQ ID NO: 1099 - DNA, 68 bp, Artificial Sequence
  gRNA
  misc_feature (1)..(25): DNA nucleotides
  misc_feature (1)..(2): Linked by phosphorothioate (PS) bond
  misc_feature (2)..(3): Linked by phosphorothioate (PS) bond
  misc_feature (26)..(68): RNA nucleotides
  misc_feature (66)..(67): Linked by phosphorothioate (PS) bond
  misc_feature (66)..(66): Modified to contain 2'-O-methyl
  misc_feature (67)..(67): Modified to contain 2'-O-methyl
  misc_feature (67)..(68): Linked by phosphorothioate (PS) bond
atgtgtttttgtcaaaagaccttttuaauuucuacucuuguagauccuugucaaggcuauuggucaau

SEQ ID NO: 1100 - DNA, 66 bp, Artificial Sequence; identical to SEQ ID NO: 1074
  gRNA
  misc_feature (1)..(25): DNA nucleotides
  misc_feature (1)..(2): Linked by phosphorothioate (PS) bond
  misc_feature (2)..(3): Linked by phosphorothioate (PS) bond
  misc_feature (26)..(66): RNA nucleotides
  misc_feature (65)..(65): Modified to contain 2'-O-methyl
  misc_feature (65)..(66): Linked by phosphorothioate (PS) bond

SEQ ID NO: 1101 - DNA, 65 bp, Artificial Sequence; identical to SEQ ID NO: 1048
  gRNA
  misc_feature (1)..(25): DNA nucleotides
  misc_feature (1)..(2): Linked by phosphorothioate (PS) bond
  misc_feature (2)..(3): Linked by phosphorothioate (PS) bond
  misc_feature (26)..(65): RNA nucleotides
  misc_feature (64)..(65): Linked by phosphorothioate (PS) bond
  misc_feature (65)..(65): Modified to contain 2'-O-methyl

SEQ ID NO: 1102 - DNA, 67 bp, Artificial Sequence
  gRNA
  misc_feature (1)..(25): DNA nucleotides
  misc_feature (1)..(2): Linked by phosphorothioate (PS) bond
  misc_feature (2)..(3): Linked by phosphorothioate (PS) bond
  misc_feature (26)..(67): RNA nucleotides
  misc_feature (65)..(66): Linked by phosphorothioate (PS) bond
  misc_feature (66)..(67): Linked by phosphorothioate (PS) bond
  misc_feature (66)..(66): Modified to contain 2'-O-methyl
  misc_feature (67)..(67): Modified to contain 2'-O-methyl
atgtgtttttgtcaaaagaccttttuaauuucuacucuuguagauccuugucaaggcuauuggucaa

SEQ ID NO: 1103 - RNA, 66 nt, Artificial Sequence
  gRNA
  misc_feature (1)..(2): Linked by phosphorothioate (PS) bond
  misc_feature (1)..(1): Modified to contain 2'-O-methyl
  misc_feature (2)..(2): Modified to contain 2'-O-methyl
  misc_feature (2)..(3): Linked by phosphorothioate (PS) bond
  misc_feature (65)..(66): Linked by phosphorothioate (PS) bond
  misc_feature (66)..(66): Modified to contain 2'-O-methyl
auguguuuuugucaaaagaccuuuuuaauuucuacucuuguagauccuugucaaggcuauugguca

SEQ ID NO: 1104 - RNA, 66 nt, Artificial Sequence
  gRNA
  misc_feature (1)..(2): Linked by phosphorothioate (PS) bond
  misc_feature (1)..(1): Modified to contain 2'-O-methyl
  misc_feature (2)..(2): Modified to contain 2'-O-methyl
  misc_feature (2)..(3): Linked by phosphorothioate (PS) bond
  misc_feature (65)..(66): Linked by phosphorothioate (PS) bond
  misc_feature (66)..(66): Modified to contain 2'-O-methyl
aaaaaaaaaaaaaaaaaaaaaaaaauaauuucuacucuuguagauccuugucaaggcuauugguca

SEQ ID NO: 1105 - RNA, 66 nt, Artificial Sequence
  gRNA
  misc_feature (1)..(2): Linked by phosphorothioate (PS) bond
  misc_feature (1)..(1): Modified to contain 2'-O-methyl
  misc_feature (2)..(2): Modified to contain 2'-O-methyl
  misc_feature (2)..(3): Linked by phosphorothioate (PS) bond
  misc_feature (65)..(66): Linked by phosphorothioate (PS) bond
  misc_feature (66)..(66): Modified to contain 2'-O-methyl
uuuuuuuuuuuuuuuuuuuuuuuuuuaauuucuacucuuguagauccuugucaaggcuauugguca

SEQ ID NO: 1106 - DNA, 42 bp, Artificial Sequence
  gRNA
  misc_feature (1)..(2): Linked by phosphorothioate (PS) bond
  misc_feature (2)..(3): Linked by phosphorothioate (PS) bond
uaauuucuacucuuguagauccuugucaggcuauuggtcaag

SEQ ID NO: 1107 - protein, 1331 aa, Artificial Sequence
  Cpf1
  MISC_FEATURE (1310)..(1331): NLS
STQFEGFTNLYQVSKTLRFELIPQGKTLKHIQEQGFIEEDKARNDHYKELKPIIDRIYKTYADQCLQLVQLDWENLSAAIDSYRKEKTEETRNALIEEQATYRNAIHDYFIGRTDNLTDAINKRHAEIYKGLFKAELFNGKVLKQLGTVTTTEHENALLRSFDKFTTYFSGFYENRKNVFSAEDISTAIPHRIVQDNFPKFKENCHIFTRLITAVPSLREHFENVKKAIGIFVSTSIEEVFSFPFYNQLLTQTQIDLYNQLLGGISREAGTEKIKGLNEVLNLAIQKNDETAHIIASLPHRFIPLFKQILSDRNTLSFILEEFKSDEEVIQSFCKYKTLLRNENVLETAEALFNELNSIDLTHIFISHKKLETISSALCDHWDTLRNALYERRISELTGKITKSAKEKVQRSLKHEDINLQEIISAAGKELSEAFKQKTSEILSHAHAALDQPLPTTLKKQEEKEILKSQLDSLLGLYHLLDWFAVDESNEVDPEFSARLTGIKLEMEPSLSFYNKARNYATKKPYSVEKFKLNFQRPTLASGWDVNKEKNNGAILFVKNGLYYLGIMPKQKGRYKALSFEPTEKTSEGFDKMYYDYFPDAAKMIPKCSTQLKAVTAHFQTHTTPILLSNNFIEPLEITKEIYDLNNPEKEPKKFQTAYAKKTGDQKGYREALCKWIDFTRDFLSKYTKTTSIDLSSLRPSSQYKDLGEYYAELNPLLYHISFQRIAEKEIMDAVETGKLYLFQIYNKDFAKGHHGKPNLHTLYWTGLFSPENLAKTSIKLNGQAELFYRPKSRMKRMAHRLGEKMLNKKLKDQKTPIPDTLYQELYDYVNHRLSHDLSDEARALLPNVITKEVSHEIIKDRRFTSDKFLFHVPITLNYQAANSPSKFNQRVNAYLKEHPETPIIGIDRGERNLIYITVIDSTGKILEQRSLNTIQQFDYQKKLDNREKERVAARQAWSVVGTIKDLKQGYLSQVIHEIVDLMIHYQAVVVLENLNFGFKSKRTGIAEKAVYQQFEKMLIDKLNCLVLKDYPAEKVGGVLNPYQLTDQFTSFAKMGTQSGFLFYVPAPYTSKIDPLTGFVDPFVWKTIKNHESRKHFLEGFDFLHYDVKTGDFILHFKMNRNLSFQRGLPGFMPAWDIVFEKNETQFDAKGTPFIAGKRIVPVIENHRFTGRYRDLYPANELIALLEEKGIVFRDGSNILPKLLENDDSHAIDTMVALIRSVLQMRNSNAATGEDYINSPVRDLNGVCFDSRFQNPEWPMDADANGAYHIALKGQLLLNHLKESKDLKLQNGISNQDWLAYIQELRNGRSSDDEATADSQHAAPPKKKRKV

SEQ ID NO: 1108 - protein, 1363 aa, Artificial Sequence
  Cpf1
  MISC_FEATURE (1310)..(1331): NLS
  MISC_FEATURE (1358)..(1363): His tag
STQFEGFTNLYQVSKTLRFELIPQGKTLKHIQEQGFIEEDKARNDHYKELKPIIDRIYKTYADQCLQLVQLDWENLSAAIDSYRKEKTEETRNALIEEQATYRNAIHDYFIGRTDNLTDAINKRHAEIYKGLFKAELFNGKVLKQLGTVTTTEHENALLRSFDKFTTYFSGFYENRKNVFSAEDISTAIPHRIVQDNFPKFKENCHIFTRLITAVPSLREHFENVKKAIGIFVSTSIEEVFSFPFYNQLLTQTQIDLYNQLLGGISREAGTEKIKGLNEVLNLAIQKNDETAHIIASLPHRFIPLFKQILSDRNTLSFILEEFKSDEEVIQSFCKYKTLLRNENVLETAEALFNELNSIDLTHIFISHKKLETISSALCDHWDTLRNALYERRISELTGKITKSAKEKVQRSLKHEDINLQEIISAAGKELSEAFKQKTSEILSHAHAALDQPLPTTLKKQEEKEILKSQLDSLLGLYHLLDWFAVDESNEVDPEFSARLTGIKLEMEPSLSFYNKARNYATKKPYSVEKFKLNFQRPTLASGWDVNKEKNNGAILFVKNGLYYLGIMPKQKGRYKALSFEPTEKTSEGFDKMYYDYFPDAAKMIPKCSTQLKAVTAHFQTHTTPILLSNNFIEPLEITKEIYDLNNPEKEPKKFQTAYAKKTGDQKGYREALCKWIDFTRDFLSKYTKTTSIDLSSLRPSSQYKDLGEYYAELNPLLYHISFQRIAEKEIMDAVETGKLYLFQIYNKDFAKGHHGKPNLHTLYWTGLFSPENLAKTSIKLNGQAELFYRPKSRMKRMAHRLGEKMLNKKLKDQKTPIPDTLYQELYDYVNHRLSHDLSDEARALLPNVITKEVSHEIIKDRRFTSDKFLFHVPITLNYQAANSPSKFNQRVNAYLKEHPETPIIGIDRGERNLIYITVIDSTGKILEQRSLNTIQQFDYQKKLDNREKERVAARQAWSVVGTIKDLKQGYLSQVIHEIVDLMIHYQAVVVLENLNFGFKSKRTGIAEKAVYQQFEKMLIDKLNCLVLKDYPAEKVGGVLNPYQLTDQFTSFAKMGTQSGFLFYVPAPYTSKIDPLTGFVDPFVWKTIKNHESRKHFLEGFDFLHYDVKTGDFILHFKMNRNLSFQRGLPGFMPAWDIVFEKNETQFDAKGTPFIAGKRIVPVIENHRFTGRYRDLYPANELIALLEEKGIVFRDGSNILPKLLENDDSHAIDTMVALIRSVLQMRNSNAATGEDYINSPVRDLNGVCFDSRFQNPEWPMDADANGAYHIALKGQLLLNHLKESKDLKLQNGISNQDWLAYIQELRNGRSSDDEATADSQHAAPPKKKRKVGGSGGSGGSGGSGGSGGSGGSGGSLEHHHHHH

SEQ ID NO: 1109 - protein, 1361 aa, Artificial Sequence
  Cpf1
  MISC_FEATURE (1342)..(1348): NLS
  MISC_FEATURE (1356)..(1361): His tag
MGRDPGKPIPNPLLGLDSTAPKKKRKVGIHGVPAATQFEGFTNLYQVSKTLRFELIPQGKTLKHIQEQGFIEEDKARNDHYKELKPIIDRIYKTYADQCLQLVQLDWENLSAAIDSYRKEKTEETRNALIEEQATYRNAIHDYFIGRTDNLTDAINKRHAEIYKGLFKAELFNGKVLKQLGTVTTTEHENALLRSFDKFTTYFSGFYENRKNVFSAEDISTAIPHRIVQDNFPKFKENCHIFTRLITAVPSLREHFENVKKAIGIFVSTSIEEVFSFPFYNQLLTQTQIDLYNQLLGGISREAGTEKIKGLNEVLNLAIQKNDETAHIIASLPHRFIPLFKQILSDRNTLSFILEEFKSDEEVIQSFCKYKTLLRNENVLETAEALFNELNSIDLTHIFISHKKLETISSALCDHWDTLRNALYERRISELTGKITKSAKEKVQRSLKHEDINLQEIISAAGKELSEAFKQKTSEILSHAHAALDQPLPTTLKKQEEKEILKSQLDSLLGLYHLLDWFAVDESNEVDPEFSARLTGIKLEMEPSLSFYNKARNYATKKPYSVEKFKLNFQMPTLASGWDVNKEKNNGAILFVKNGLYYLGIMPKQKGRYKALSFEPTEKTSEGFDKMYYDYFPDAAKMIPKCSTQLKAVTAHFQTHTTPILLSNNFIEPLEITKEIYDLNNPEKEPKKFQTAYAKKTGDQKGYREALCKWIDFTRDFLSKYTKTTSIDLSSLRPSSQYKDLGEYYAELNPLLYHISFQRIAEKEIMDAVETGKLYLFQIYNKDFAKGHHGKPNLHTLYWTGLFSPENLAKTSIKLNGQAELFYRPKSRMKRMAHRLGEKMLNKKLKDQKTPIPDTLYQELYDYVNHRLSHDLSDEARALLPNVITKEVSHEIIKDRRFTSDKFFFHVPITLNYQAANSPSKFNQRVNAYLKEHPETPIIGIDRGERNLIYITVIDSTGKILEQRSLNTIQQFDYQKKLDNREKERVAARQAWSVVGTIKDLKQGYLSQVIHEIVDLMIHYQAVVVLENLNFGFKSKRTGIAEKAVYQQFEKMLIDKLNCLVLKDYPAEKVGGVLNPYQLTDQFTSFAKMGTQSGFLFYVPAPYTSKIDPLTGFVDPFVWKTIKNHESRKHFLEGFDFLHYDVKTGDFILHFKMNRNLSFQRGLPGFMPAWDIVFEKNETQFDAKGTPFIAGKRIVPVIENHRFTGRYRDLYPANELIALLEEKGIVFRDGSNILPKLLENDDSHAIDTMVALIRSVLQMRNSNAATGEDYINSPVRDLNGVCFDSRFQNPEWPMDADANGAYHIALKGQLLLNHLKESKDLKLQNGISNQDWLAYIQELRNPKKKRKVKLAAALEHHHHHH

SEQ ID NO: 1110 - DNA, 4002 bp, Artificial Sequence
  His-AsCpf1-sNLS-sNLS H800A
  misc_feature (7)..(24): His tag
  misc_feature (3955)..(3975): sNLS
  misc_feature (3982)..(4002): sNLS
atgggccatcatcatcaccatcacggtagcacccagtttgaaggctttaccaatctgtatcaggttagcaaaaccctgcgttttgaactgattccgcagggtaaaaccctgaaacatattcaagaacagggcttcatcgaagaggataaagcacgtaacgatcactacaaagaactgaaaccgattatcgaccgcatctataaaacgtacgcagatcagtgtctgcagctggttcagctggattgggaaaatctgagcgcagcaattgatagttatcgcaaagagaaaaccgaagaaacccgtaatgcactgattgaagaacaggcaacctatcgtaatgccatccatgattatttcattggtcgtaccgataatctgaccgatgcaattaacaaacgtcacgccgaaatctataaaggcctgtttaaagccgaactgtttaatggcaaagttctgaaacagctgggcaccgttaccaccaccgaacatgaaaatgcactgctgcgtagctttgataaattcaccacctatttcagcggcttttatgagaatcgcaaaaacgtgtttagcgcagaagatattagcaccgcaattccgcatcgtattgtgcaggataatttcccgaaattcaaagagaactgccacatttttacccgtctgattaccgcagttccgagcctgcgtgaacattttgaaaacgttaaaaaagccatcggcatctttgttagcaccagcattgaagaagtttttagcttcccgttttacaatcagctgctgacccagacacagattgatctgtataaccagctgttaggtggtattagccgtgaagcaggcaccgaaaaaatcaaaggtctgaatgaagtgctgaatctggccattcagaaaaatgatgaaaccgcacatattattgcaagcctgccgcatcgttttattccgctgtttaagcagattctgagcgatcgtaataccctgagctttattctggaagaattcaaatccgatgaagaggtgattcagagcttctgcaaatacaaaacgctgctgcgcaatgaaaatgttctggaaactgccgaagcactgtttaacgaactgaatagcattgatctgacccacatctttatcagccacaaaaaactggaaaccatttcaagcgcactgtgtgatcattgggataccctgcgtaatgccctgtatgaacgtcgtattagcgaactgaccggtaaaattaccaaaagcgcgaaagaaaaagttcagcgcagtctgaaacatgaggatattaatctgcaagagattattagcgcagccggtaaagaactgtcagaagcatttaaacagaaaaccagcgaaattctgagccatgcacatgcagcactggatcagccgctgccgaccacactgaaaaaacaagaagaaaaagagatcctgaaaagccagctggatagcctgctgggtctgtatcatctgctggactggtttgcagttgatgaaagcaatgaagttgatccggaatttagcgcacgtctgaccggcattaagctggaaatggaaccgagcctgagtttttacaataaagcccgtaattatgccaccaaaaaaccgtatagcgtggaaaaattcaagctgaacttccagatgccgacactggcaagcggttgggatgttaataaagaaaagaacaatggtgccatcctgttcgtgaaaaatggcctgtattatctgggtatcatgccgaaacagaaaggtcgttataaagcactgagctttgaaccgacagaaaaaaccagtgaaggcttcgataaaatgtactatgattactttccggacgcagccaaaatgattccgaaatgcagcacccagctgaaagcagttaccgcacattttcagacccataccacaccgattctgctgagcaataactttattgaaccgctggaaatcaccaaagagatctacgatctgaataacccggaaaaagagccgaaaaagtttcagaccgcctatgcaaaaaaaaccggtgatcagaaaggttatcgtgaagcgctgtgtaaatggattgatttcacccgtgattttctgagcaaatacaccaaaaccaccagtatcgatctgagcagcctgcgtccgagcagccagtataaagatctgggcgaatattatgcagaactgaatccgctgctgtatcatattagctttcagcgtattgccgagaaagaaataatggatgcagttgaaaccggtaagctgtacctgttccagatttataacaaagactttgccaaaggccatcatggtaaaccgaatctgcataccctgtattggaccggtctgtttagccctgaaaatctggcaaaaaccagcattaaactgaatggtcaggcggaactgttttatcgtccgaaaagccgtatgaaacgtatggcagcacgtctgggtgaaaaaatgctgaataaaaagctgaaggatcagaaaaccccgattccggatacactgtatcaagagctgtatgattatgtgaatcatcgtctgagtcatgatctgagtgatgaagcacgtgccctgctgccgaatgttattaccaaagaagttagccacgagatcattaaagatcgtcgttttaccagcgacaagttttttttccatgttccgattacgctgaattatcaggcagcaaatagcccgagcaaatttaaccagcgtgtgaatgcatatctgaaagaacatccggaaacaccgattattggtattgatcgtggtgaacgcaacctgatttatatcaccgttattgatagcaccggcaagatcctggaacagcgtagcctgaataccattcagcagtttgattatcagaaaaagctggacaaccgtgaaaaagaacgtgttgcagcccgtcaggcatggtcagttgttggtacaattaaagacctgaaacagggttatctgagccaggttattcatgaaattgtggatctgatgattcattaccaggcagttgttgtgctggaaaacctgaattttggctttaaaagcaaacgtaccggcattgcggaaaaagcagtttatcagcagttcgaaaagatgctgatcgataaactgaactgtctggtgctgaaagattatccggctgaaaaagttggcggtgttctgaatccgtatcagctgaccgatcagtttaccagctttgcaaaaatgggcacccagagcggatttctgttttatgttccggcaccgtatacgagcaaaattgatccgctgaccggttttgttgatccgtttgtttggaaaaccatcaaaaaccatgaaagccgcaaacattttctggaaggttttgatttcctgcattacgacgttaagaccggtgattttattctgcactttaagatgaatcggaacctgtcatttcagcgtggtctgcctggttttatgcctgcatgggatattgtgtttgagaaaaacgaaacacagttcgatgcaaaaggcaccccgtttattgcaggtaaacgtattgttccggtgattgaaaatcatcgtttcaccggtcgttatcgcgatctgtatccggcaaatgaactgatcgcactgctggaagagaaaggtattgtttttcgtgatggctcaaacattctgccgaaactgttagagaatgatgatagccatgccattgataccatggttgccctgattcgtagcgttctgcagatgcgtaatagcaatgcagcaaccggtgaagattacattaatagtccggttcgtgatctgaatggtgtttgttttgatagccgttttcagaatccggaatggccgatggatgcggatgcaaatggtgcatatcatattgcactgaaaggacagctgctgctgaaccacctgaaagaaagtaaagatttgaagctgcagaatggcattagcaatcaggattggctggcatatatccaagaactgcgtaacggttctcctaagaaaaagcgcaaagttggcagtccgaagaagaaacgtaaggtt

SEQ ID NO: 1111 - DNA, 4089 bp, Artificial Sequence
  Cpf1
  misc_feature (3928)..(3993): NLS
  misc_feature (4072)..(4089): His tag
atgacccagtttgaaggtttcaccaatctgtatcaggttagcaaaaccctgcgttttgaactgattccgcagggtaaaaccctgaaacatattcaagaacagggcttcatcgaagaggataaagcacgtaacgatcactacaaagaactgaaaccgattatcgaccgcatctataaaacctatgcagatcagtgtctgcagctggttcagctggattgggaaaatctgagcgcagcaattgatagttatcgcaaagaaaaaaccgaagaaacccgtaatgcactgattgaagaacaggcaacctatcgtaatgccatccatgattatttcattggtcgtaccgataatctgaccgatgcaattaacaaacgtcacgccgaaatctataaaggcctgtttaaagccgaactgtttaatggcaaagttctgaaacagctgggcaccgttaccaccaccgaacatgaaaatgcactgctgcgtagctttgataaattcaccacctatttcagcggcttttatgagaatcgcaaaaacgtgtttagcgcagaagatattagcaccgcaattccgcatcgtattgtgcaggataatttcccgaaattcaaagagaactgccacatttttacccgtctgattaccgcagttccgagcctgcgtgaacattttgaaaacgttaaaaaagccatcggcatctttgttagcaccagcattgaagaagtttttagcttcccgttttacaatcagctgctgacccagacccagattgatctgtataaccaactgctgggtggtattagccgtgaagcaggcaccgaaaaaatcaaaggtctgaatgaagtgctgaatctggccattcagaaaaatgatgaaaccgcacatattattgcaagcctgccgcatcgttttattccgctgttcaaacaaattctgagcgatcgtaataccctgagctttattctggaagaattcaaatccgatgaagaggtgattcagagcttttgcaaatacaaaacgctgctgcgcaatgaaaatgttctggaaactgccgaagcactgtttaacgaactgaatagcattgatctgacccacatctttatcagccacaaaaaactggaaaccatttcaagcgcactgtgtgatcattgggataccctgcgtaatgccctgtatgaacgtcgtattagcgaactgaccggtaaaattaccaaaagcgcgaaagaaaaagttcagcgcagtctgaaacatgaggatattaatctgcaagagattattagcgcagccggtaaagaactgtcagaagcatttaaacagaaaaccagcgaaattctgtcacatgcacatgcagcactggatcagccgctgccgaccaccctgaaaaaacaagaagaaaaagaaatcctgaaaagccagctggatagcctgctgggtctgtatcatctgctggactggtttgcagttgatgaaagcaatgaagttgatccggaatttagcgcacgtctgaccggcattaaactggaaatggaaccgagcctgagcttttataacaaagcccgtaattatgccaccaaaaaaccgtatagcgtcgaaaaattcaaactgaactttcagcgtccgaccctggcaagcggttgggatgttaataaagaaaaaaacaacggtgccatcctgttcgtgaaaaatggcctgtattatctgggtattatgccgaaacagaaaggtcgttataaagcgctgagctttgaaccgacggaaaaaaccagtgaaggttttgataaaatgtactacgactattttccggatgcagccaaaatgattccgaaatgtagcacccagctgaaagcagttaccgcacattttcagacccataccaccccgattctgctgagcaataactttattgaaccgctggaaatcaccaaagagatctacgatctgaataacccggaaaaagagccgaaaaaattccagaccgcatatgcaaaaaaaaccggtgatcagaaaggttatcgtgaagcgctgtgtaaatggattgatttcacccgtgattttctgagcaaatacaccaaaaccaccagtatcgatctgagcagcctgcgtccgagcagccagtataaagatctgggcgaatattatgcagaactgaatccgctgctgtatcatattagctttcagcgtattgccgagaaagaaatcatggacgcagttgaaaccggtaaactgtacctgttccagatctacaataaagattttgccaaaggccatcatggcaaaccgaatctgcataccctgtattggaccggtctgtttagccctgaaaatctggcaaaaacctcgattaaactgaatggtcaggcggaactgttttatcgtccgaaaagccgtatgaaacgtatggcacatcgtctgggtgaaaaaatgctgaacaaaaaactgaaagaccagaaaaccccgatcccggatacactgtatcaagaactgtatgattatgtgaaccatcgtctgagccatgatctgagtgatgaagcacgtgccctgctgccgaatgttattaccaaagaagttagccacgagatcattaaagatcgtcgttttaccagcgacaaattcctgtttcatgtgccgattaccctgaattatcaggcagcaaatagcccgagcaaatttaaccagcgtgttaatgcatatctgaaagaacatccagaaacgccgattattggtattgatcgtggtgaacgtaacctgatttatatcaccgttattgatagcaccggcaaaatcctggaacagcgtagcctgaataccattcagcagtttgattaccagaaaaaactggataatcgcgagaaagaacgtgttgcagcacgtcaggcatggtcagttgttggtacaattaaagacctgaaacagggttatctgagccaggttattcatgaaattgtggatctgatgattcactatcaggccgttgttgtgctggaaaacctgaattttggctttaaaagcaaacgtaccggcattgcagaaaaagcagtttatcagcagttcgagaaaatgctgattgacaaactgaattgcctggtgctgaaagattatccggctgaaaaagttggtggtgttctgaatccgtatcagctgaccgatcagtttaccagctttgcaaaaatgggcacccagagcggatttctgttttatgttccggcaccgtatacgagcaaaattgatccgctgaccggttttgttgatccgtttgtttggaaaaccatcaaaaaccatgaaagccgcaaacattttctggaaggtttcgattttctgcattacgacgttaaaacgggtgatttcatcctgcactttaaaatgaatcgcaatctgagttttcagcgtggcctgcctggttttatgcctgcatgggatattgtgtttgagaaaaacgaaacacagttcgatgcaaaaggcaccccgtttattgcaggtaaacgtattgttccggtgattgaaaatcatcgtttcaccggtcgttatcgcgatctgtatccggcaaatgaactgatcgcactgctggaagagaaaggtattgtttttcgtgatggctcaaacattctgccgaaactgctggaaaatgatgatagccatgcaattgataccatggttgcactgattcgtagcgttctgcagatgcgtaatagcaatgcagcaaccggtgaagattacattaatagtccggttcgtgatctgaatggtgtttgttttgatagccgttttcagaatccggaatggccgatggatgcagatgcaaatggtgcatatcatattgcactgaaaggacagctgctgctgaaccacctgaaagaaagcaaagatctgaaactgcaaaacggcattagcaatcaggattggctggcatatatccaagaactgcgtaacggtcgtagcagtgatgatgaagcaaccgcagatagccagcatgcagcaccgcctaaaaagaaacgtaaagttggtggtagcggtggttcaggtggtagtggcggtagtggtggctcagggggttctggtggctctggtggtagcctcgagcaccaccaccaccaccac

SEQ ID NO: 1112 - DNA, 4089 bp, Artificial Sequence
  Cpf1
  misc_feature (3928)..(3993): NLS
  misc_feature (4072)..(4089): His tag
atgacccagtttgaaggtttcaccaatctgtatcaggttagcaaaaccctgcgttttgaactgattccgcagggtaaaaccctgaaacatattcaagaacagggcttcatcgaagaggataaagcacgtaacgatcactacaaagaactgaaaccgattatcgaccgcatctataaaacctatgcagatcagtgtctgcagctggttcagctggattgggaaaatctgagcgcagcaattgatagttatcgcaaagaaaaaaccgaagaaacccgtaatgcactgattgaagaacaggcaacctatcgtaatgccatccatgattatttcattggtcgtaccgataatctgaccgatgcaattaacaaacgtcacgccgaaatctataaaggcctgtttaaagccgaactgtttaatggcaaagttctgaaacagctgggcaccgttaccaccaccgaacatgaaaatgcactgctgcgtagctttgataaattcaccacctatttcagcggcttttatgagaatcgcaaaaacgtgtttagcgcagaagatattagcaccgcaattccgcatcgtattgtgcaggataatttcccgaaattcaaagagaactgccacatttttacccgtctgattaccgcagttccgagcctgcgtgaacattttgaaaacgttaaaaaagccatcggcatctttgttagcaccagcattgaagaagtttttagcttcccgttttacaatcagctgctgacccagacccagattgatctgtataaccaactgctgggtggtattagccgtgaagcaggcaccgaaaaaatcaaaggtctgaatgaagtgctgaatctggccattcagaaaaatgatgaaaccgcacatattattgcaagcctgccgcatcgttttattccgctgttcaaacaaattctgagcgatcgtaataccctgagctttattctggaagaattcaaatccgatgaagaggtgattcagagcttttgcaaatacaaaacgctgctgcgcaatgaaaatgttctggaaactgccgaagcactgtttaacgaactgaatagcattgatctgacccacatctttatcagccacaaaaaactggaaaccatttcaagcgcactgtgtgatcattgggataccctgcgtaatgccctgtatgaacgtcgtattagcgaactgaccggtaaaattaccaaaagcgcgaaagaaaaagttcagcgcagtctgaaacatgaggatattaatctgcaagagattattagcgcagccggtaaagaactgtcagaagcatttaaacagaaaaccagcgaaattctgtcacatgcacatgcagcactggatcagccgctgccgaccaccctgaaaaaacaagaagaaaaagaaatcctgaaaagccagctggatagcctgctgggtctgtatcatctgctggactggtttgcagttgatgaaagcaatgaagttgatccggaatttagcgcacgtctgaccggcattaaactggaaatggaaccgagcctgagcttttataacaaagcccgtaattatgccaccaaaaaaccgtatagcgtcgaaaaattcaaactgaactttcagatgccgaccctggcaagcggttgggatgttaataaagaaaaaaacaacggtgccatcctgttcgtgaaaaatggcctgtattatctgggtattatgccgaaacagaaaggtcgttataaagcgctgagctttgaaccgacggaaaaaaccagtgaaggttttgataaaatgtactacgactattttccggatgcagccaaaatgattccgaaatgtagcacccagctgaaagcagttaccgcacattttcagacccataccaccccgattctgctgagcaataactttattgaaccgctggaaatcaccaaagagatctacgatctgaataacccggaaaaagagccgaaaaaattccagaccgcatatgcaaaaaaaaccggtgatcagaaaggttatcgtgaagcgctgtgtaaatggattgatttcacccgtgattttctgagcaaatacaccaaaaccaccagtatcgatctgagcagcctgcgtccgagcagccagtataaagatctgggcgaatattatgcagaactgaatccgctgctgtatcatattagctttcagcgtattgccgagaaagaaatcatggacgcagttgaaaccggtaaactgtacctgttccagatctacaataaagattttgccaaaggccatcatggcaaaccgaatctgcataccctgtattggaccggtctgtttagccctgaaaatctggcaaaaacctcgattaaactgaatggtcaggcggaactgttttatcgtccgaaaagccgtatgaaacgtatggcacatcgtctgggtgaaaaaatgctgaacaaaaaactgaaagaccagaaaaccccgatcccggatacactgtatcaagaactgtatgattatgtgaaccatcgtctgagccatgatctgagtgatgaagcacgtgccctgctgccgaatgttattaccaaagaagttagccacgagatcattaaagatcgtcgttttaccagcgacaaattcttttttcatgtgccgattaccctgaattatcaggcagcaaatagcccgagcaaatttaaccagcgtgttaatgcatatctgaaagaacatccagaaacgccgattattggtattgatcgtggtgaacgtaacctgatttatatcaccgttattgatagcaccggcaaaatcctggaacagcgtagcctgaataccattcagcagtttgattaccagaaaaaactggataatcgcgagaaagaacgtgttgcagcacgtcaggcatggtcagttgttggtacaattaaagacctgaaacagggttatctgagccaggttattcatgaaattgtggatctgatgattcactatcaggccgttgttgtgctggaaaacctgaattttggctttaaaagcaaacgtaccggcattgcagaaaaagcagtttatcagcagttcgagaaaatgctgattgacaaactgaattgcctggtgctgaaagattatccggctgaaaaagttggtggtgttctgaatccgtatcagctgaccgatcagtttaccagctttgcaaaaatgggcacccagagcggatttctgttttatgttccggcaccgtatacgagcaaaattgatccgctgaccggttttgttgatccgtttgtttggaaaaccatcaaaaaccatgaaagccgcaaacattttctggaaggtttcgattttctgcattacgacgttaaaacgggtgatttcatcctgcactttaaaatgaatcgcaatctgagttttcagcgtggcctgcctggttttatgcctgcatgggatattgtgtttgagaaaaacgaaacacagttcgatgcaaaaggcaccccgtttattgcaggtaaacgtattgttccggtgattgaaaatcatcgtttcaccggtcgttatcgcgatctgtatccggcaaatgaactgatcgcactgctggaagagaaaggtattgtttttcgtgatggctcaaacattctgccgaaactgctggaaaatgatgatagccatgcaattgataccatggttgcactgattcgtagcgttctgcagatgcgtaatagcaatgcagcaaccggtgaagattacattaatagtccggttcgtgatctgaatggtgtttgttttgatagccgttttcagaatccggaatggccgatggatgcagatgcaaatggtgcatatcatattgcactgaaaggacagctgctgctgaaccacctgaaagaaagcaaagatctgaaactgcaaaacggcattagcaatcaggattggctggcatatatccaagaactgcgtaacggtcgtagcagtgatgatgaagcaaccgcagatagccagcatgcagcaccgcctaaaaagaaacgtaaagttggtggtagcggtggttcaggtggtagtggcggtagtggtggctcagggggttctggtggctctggtggtagcctcgagcaccaccaccaccaccac

SEQ ID NO: 1113 - DNA, 4089 bp, Artificial Sequence
  Cpf1
  misc_feature (3928)..(3993): NLS
  misc_feature (4072)..(4089): His tag
atgacccagtttgaaggtttcaccaatctgtatcaggttagcaaaaccctgcgttttgaactgattccgcagggtaaaaccctgaaacatattcaagaacagggcttcatcgaagaggataaagcacgtaacgatcactacaaagaactgaaaccgattatcgaccgcatctataaaacctatgcagatcagtgtctgcagctggttcagctggattgggaaaatctgagcgcagcaattgatagttatcgcaaagaaaaaaccgaagaaacccgtaatgcactgattgaagaacaggcaacctatcgtaatgccatccatgattatttcattggtcgtaccgataatctgaccgatgcaattaacaaacgtcacgccgaaatctataaaggcctgtttaaagccgaactgtttaatggcaaagttctgaaacagctgggcaccgttaccaccaccgaacatgaaaatgcactgctgcgtagctttgataaattcaccacctatttcagcggcttttatgagaatcgcaaaaacgtgtttagcgcagaagatattagcaccgcaattccgcatcgtattgtgcaggataatttcccgaaattcaaagagaactgccacatttttacccgtctgattaccgcagttccgagcctgcgtgaacattttgaaaacgttaaaaaagccatcggcatctttgttagcaccagcattgaagaagtttttagcttcccgttttacaatcagctgctgacccagacccagattgatctgtataaccaactgctgggtggtattagccgtgaagcaggcaccgaaaaaatcaaaggtctgaatgaagtgctgaatctggccattcagaaaaatgatgaaaccgcacatattattgcaagcctgccgcatcgttttattccgctgttcaaacaaattctgagcgatcgtaataccctgagctttattctggaagaattcaaatccgatgaagaggtgattcagagcttttgcaaatacaaaacgctgctgcgcaatgaaaatgttctggaaactgccgaagcactgtttaacgaactgaatagcattgatctgacccacatctttatcagccacaaaaaactggaaaccatttcaagcgcactgtgtgatcattgggataccctgcgtaatgccctgtatgaacgtcgtattagcgaactgaccggtaaaattaccaaaagcgcgaaagaaaaagttcagcgcagtctgaaacatgaggatattaatctgcaagagattattagcgcagccggtaaagaactgtcagaagcatttaaacagaaaaccagcgaaattctgtcacatgcacatgcagcactggatcagccgctgccgaccaccctgaaaaaacaagaagaaaaagaaatcctgaaaagccagctggatagcctgctgggtctgtatcatctgctggactggtttgcagttgatgaaagcaatgaagttgatccggaatttagcgcacgtctgaccggcattaaactggaaatggaaccgagcctgagcttttataacaaagcccgtaattatgccaccaaaaaaccgtatagcgtcgaaaaattcaaactgaactttcagcgtccgaccctggcaagcggttgggatgttaataaagaaaaaaacaacggtgccatcctgttcgtgaaaaatggcctgtattatctgggtattatgccgaaacagaaaggtcgttataaagcgctgagctttgaaccgacggaaaaaaccagtgaaggttttgataaaatgtactacgactattttccggatgcagccaaaatgattccgaaatgtagcacccagctgaaagcagttaccgcacattttcagacccataccaccccgattctgctgagcaataactttattgaaccgctggaaatcaccaaagagatctacgatctgaataacccggaaaaagagccgaaaaaattccagaccgcatatgcaaaaaaaaccggtgatcagaaaggttatcgtgaagcgctgtgtaaatggattgatttcacccgtgattttctgagcaaatacaccaaaaccaccagtatcgatctgagcagcctgcgtccgagcagccagtataaagatctgggcgaatattatgcagaactgaatccgctgctgtatcatattagctttcagcgtattgccgagaaagaaatcatggacgcagttgaaaccggtaaactgtacctgttccagatctacaataaagattttgccaaaggccatcatggcaaaccgaatctgcataccctgtattggaccggtctgtttagccctgaaaatctggcaaaaacctcgattaaactgaatggtcaggcggaactgttttatcgtccgaaaagccgtatgaaacgtatggcagctcgtctgggtgaaaaaatgctgaacaaaaaactgaaagaccagaaaaccccgatcccggatacactgtatcaagaactgtatgattatgtgaaccatcgtctgagccatgatctgagtgatgaagcacgtgccctgctgccgaatgttattaccaaagaagttagccacgagatcattaaagatcgtcgttttaccagcgacaaattcctgtttcatgtgccgattaccctgaattatcaggcagcaaatagcccgagcaaatttaaccagcgtgttaatgcatatctgaaagaacatccagaaacgccgattattggtattgatcgtggtgaacgtaacctgatttatatcaccgttattgatagcaccggcaaaatcctggaacagcgtagcctgaataccattcagcagtttgattaccagaaaaaactggataatcgcgagaaagaacgtgttgcagcacgtcaggcatggtcagttgttggtacaattaaagacctgaaacagggttatctgagccaggttattcatgaaattgtggatctgatgattcactatcaggccgttgttgtgctggaaaacctgaattttggctttaaaagcaaacgtaccggcattgcagaaaaagcagtttatcagcagttcgagaaaatgctgattgacaaactgaattgcctggtgctgaaagattatccggctgaaaaagttggtggtgttctgaatccgtatcagctgaccgatcagtttaccagctttgcaaaaatgggcacccagagcggatttctgttttatgttccggcaccgtatacgagcaaaattgatccgctgaccggttttgttgatccgtttgtttggaaaaccatcaaaaaccatgaaagccgcaaacattttctggaaggtttcgattttctgcattacgacgttaaaacgggtgatttcatcctgcactttaaaatgaatcgcaatctgagttttcagcgtggcctgcctggttttatgcctgcatgggatattgtgtttgagaaaaacgaaacacagttcgatgcaaaaggcaccccgtttattgcaggtaaacgtattgttccggtgattgaaaatcatcgtttcaccggtcgttatcgcgatctgtatccggcaaatgaactgatcgcactgctggaagagaaaggtattgtttttcgtgatggctcaaacattctgccgaaactgctggaaaatgatgatagccatgcaattgataccatggttgcactgattcgtagcgttctgcagatgcgtaatagcaatgcagcaaccggtgaagattacattaatagtccggttcgtgatctgaatggtgtttgttttgatagccgttttcagaatccggaatggccgatggatgcagatgcaaatggtgcatatcatattgcactgaaaggacagctgctgctgaaccacctgaaagaaagcaaagatctgaaactgcaaaacggcattagcaatcaggattggctggcatatatccaagaactgcgtaacggtcgtagcagtgatgatgaagcaaccgcagatagccagcatgcagcaccgcctaaaaagaaacgtaaagttggtggtagcggtggttcaggtggtagtggcggtagtggtggctcagggggttctggtggctctggtggtagcctcgagcaccaccaccaccaccac

SEQ ID NO: 1114 - DNA, 3993 bp, Artificial Sequence
  Cpf1
  misc_feature (3928)..(3993): NLS
atgacccagtttgaaggtttcaccaatctgtatcaggttagcaaaaccctgcgttttgaactgattccgcagggtaaaaccctgaaacatattcaagaacagggcttcatcgaagaggataaagcacgtaacgatcactacaaagaactgaaaccgattatcgaccgcatctataaaacctatgcagatcagtgtctgcagctggttcagctggattgggaaaatctgagcgcagcaattgatagttatcgcaaagaaaaaaccgaagaaacccgtaatgcactgattgaagaacaggcaacctatcgtaatgccatccatgattatttcattggtcgtaccgataatctgaccgatgcaattaacaaacgtcacgccgaaatctataaaggcctgtttaaagccgaactgtttaatggcaaagttctgaaacagctgggcaccgttaccaccaccgaacatgaaaatgcactgctgcgtagctttgataaattcaccacctatttcagcggcttttatgagaatcgcaaaaacgtgtttagcgcagaagatattagcaccgcaattccgcatcgtattgtgcaggataatttcccgaaattcaaagagaactgccacatttttacccgtctgattaccgcagttccgagcctgcgtgaacattttgaaaacgttaaaaaagccatcggcatctttgttagcaccagcattgaagaagtttttagcttcccgttttacaatcagctgctgacccagacccagattgatctgtataaccaactgctgggtggtattagccgtgaagcaggcaccgaaaaaatcaaaggtctgaatgaagtgctgaatctggccattcagaaaaatgatgaaaccgcacatattattgcaagcctgccgcatcgttttattccgctgttcaaacaaattctgagcgatcgtaataccctgagctttattctggaagaattcaaatccgatgaagaggtgattcagagcttttgcaaatacaaaacgctgctgcgcaatgaaaatgttctggaaactgccgaagcactgtttaacgaactgaatagcattgatctgacccacatctttatcagccacaaaaaactggaaaccatttcaagcgcactgtgtgatcattgggataccctgcgtaatgccctgtatgaacgtcgtattagcgaactgaccggtaaaattaccaaaagcgcgaaagaaaaagttcagcgcagtctgaaacatgaggatattaatctgcaagagattattagcgcagccggtaaagaactgtcagaagcatttaaacagaaaaccagcgaaattctgtcacatgcacatgcagcactggatcagccgctgccgaccaccctgaaaaaacaagaagaaaaagaaatcctgaaaagccagctggatagcctgctgggtctgtatcatctgctggactggtttgcagttgatgaaagcaatgaagttgatccggaatttagcgcacgtctgaccggcattaaactggaaatggaaccgagcctgagcttttataacaaagcccgtaattatgccaccaaaaaaccgtatagcgtcgaaaaattcaaactgaactttcagcgtccgaccctggcaagcggttgggatgttaataaagaaaaaaacaacggtgccatcctgttcgtgaaaaatggcctgtattatctgggtattatgccgaaacagaaaggtcgttataaagcgctgagctttgaaccgacggaaaaaaccagtgaaggttttgataaaatgtactacgactattttccggatgcagccaaaatgattccgaaatgtagcacccagctgaaagcagttaccgcacattttcagacccataccaccccgattctgctgagcaataactttattgaaccgctggaaatcaccaaagagatctacgatctgaataacccggaaaaagagccgaaaaaattccagaccgcatatgcaaaaaaaaccggtgatcagaaaggttatcgtgaagcgctgtgtaaatggattgatttcacccgtgattttctgagcaaatacaccaaaaccaccagtatcgatctgagcagcctgcgtccgagcagccagtataaagatctgggcgaatattatgcagaactgaatccgctgctgtatcatattagctttcagcgtattgccgagaaagaaatcatggacgcagttgaaaccggtaaactgtacctgttccagatctacaataaagattttgccaaaggccatcatggcaaaccgaatctgcataccctgtattggaccggtctgtttagccctgaaaatctggcaaaaacctcgattaaactgaatggtcaggcggaactgttttatcgtccgaaaagccgtatgaaacgtatggcagctcgtctgggtgaaaaaatgctgaacaaaaaactgaaagaccagaaaaccccgatcccggatacactgtatcaagaactgtatgattatgtgaaccatcgtctgagccatgatctgagtgatgaagcacgtgccctgctgccgaatgttattaccaaagaagttagccacgagatcattaaagatcgtcgttttaccagcgacaaattcctgtttcatgtgccgattaccctgaattatcaggcagcaaatagcccgagcaaatttaaccagcgtgttaatgcatatctgaaagaacatccagaaacgccgattattggtattgatcgtggtgaacgtaacctgatttatatcaccgttattgatagcaccggcaaaatcctggaacagcgtagcctgaataccattcagcagtttgattaccagaaaaaactggataatcgcgagaaagaacgtgttgcagcacgtcaggcatggtcagttgttggtacaattaaagacctgaaacagggttatctgagccaggttattcatgaaattgtggatctgatgattcactatcaggccgttgttgtgctggaaaacctgaattttggctttaaaagcaaacgtaccggcattgcagaaaaagcagtttatcagcagttcgagaaaatgctgattgacaaactgaattgcctggtgctgaaagattatccggctgaaaaagttggtggtgttctgaatccgtatcagctgaccgatcagtttaccagctttgcaaaaatgggcacccagagcggatttctgttttatgttccggcaccgtatacgagcaaaattgatccgctgaccggttttgttgatccgtttgtttggaaaaccatcaaaaaccatgaaagccgcaaacattttctggaaggtttcgattttctgcattacgacgttaaaacgggtgatttcatcctgcactttaaaatgaatcgcaatctgagttttcagcgtggcctgcctggttttatgcctgcatgggatattgtgtttgagaaaaacgaaacacagttcgatgcaaaaggcaccccgtttattgcaggtaaacgtattgttccggtgattgaaaatcatcgtttcaccggtcgttatcgcgatctgtatccggcaaatgaactgatcgcactgctggaagagaaaggtattgtttttcgtgatggctcaaacattctgccgaaactgctggaaaatgatgatagccatgcaattgataccatggttgcactgattcgtagcgttctgcagatgcgtaatagcaatgcagcaaccggtgaagattacattaatagtccggttcgtgatctgaatggtgtttgttttgatagccgttttcagaatccggaatggccgatggatgcagatgcaaatggtgcatatcatattgcactgaaaggacagctgctgctgaaccacctgaaagaaagcaaagatctgaaactgcaaaacggcattagcaatcaggattggctggcatatatccaagaactgcgtaacggtcgtagcagtgatgatgaagcaaccgcagatagccagcatgcagcaccgcctaaaaagaaacgtaaagtt

SEQ ID NO: 1115 - DNA, 3993 bp, Artificial Sequence
  Cpf1
  misc_feature (3928)..(3993): NLS
agcacccagtttgaaggtttcaccaatctgtatcaggttagcaaaaccctgcgttttgaactgattccgcagggtaaaaccctgaaacatattcaagaacagggcttcatcgaagaggataaagcacgtaacgatcactacaaagaactgaaaccgattatcgaccgcatctataaaacctatgcagatcagtgtctgcagctggttcagctggattgggaaaatctgagcgcagcaattgatagttatcgcaaagaaaaaaccgaagaaacccgtaatgcactgattgaagaacaggcaacctatcgtaatgccatccatgattatttcattggtcgtaccgataatctgaccgatgcaattaacaaacgtcacgccgaaatctataaaggcctgtttaaagccgaactgtttaatggcaaagttctgaaacagctgggcaccgttaccaccaccgaacatgaaaatgcactgctgcgtagctttgataaattcaccacctatttcagcggcttttatgagaatcgcaaaaacgtgtttagcgcagaagatattagcaccgcaattccgcatcgtattgtgcaggataatttcccgaaattcaaagagaactgccacatttttacccgtctgattaccgcagttccgagcctgcgtgaacattttgaaaacgttaaaaaagccatcggcatctttgttagcaccagcattgaagaagtttttagcttcccgttttacaatcagctgctgacccagacccagattgatctgtataaccaactgctgggtggtattagccgtgaagcaggcaccgaaaaaatcaaaggtctgaatgaagtgctgaatctggccattcagaaaaatgatgaaaccgcacatattattgcaagcctgccgcatcgttttattccgctgttcaaacaaattctgagcgatcgtaataccctgagctttattctggaagaattcaaatccgatgaagaggtgattcagagcttttgcaaatacaaaacgctgctgcgcaatgaaaatgttctggaaactgccgaagcactgtttaacgaactgaatagcattgatctgacccacatctttatcagccacaaaaaactggaaaccatttcaagcgcactgtgtgatcattgggataccctgcgtaatgccctgtatgaacgtcgtattagcgaactgaccggtaaaattaccaaaagcgcgaaagaaaaagttcagcgcagtctgaaacatgaggatattaatctgcaagagattattagcgcagccggtaaagaactgtcagaagcatttaaacagaaaaccagcgaaattctgtcacatgcacatgcagcactggatcagccgctgccgaccaccctgaaaaaacaagaagaaaaagaaatcctgaaaagccagctggatagcctgctgggtctgtatcatctgctggactggtttgcagttgatgaaagcaatgaagttgatccggaatttagcgcacgtctgaccggcattaaactggaaatggaaccgagcctgagcttttataacaaagcccgtaattatgccaccaaaaaaccgtatagcgtcgaaaaattcaaactgaactttcagcgtccgaccctggcaagcggttgggatgttaataaagaaaaaaacaacggtgccatcctgttcgtgaaaaatggcctgtattatctgggtattatgccgaaacagaaaggtcgttataaagcgctgagctttgaaccgacggaaaaaaccagtgaaggttttgataaaatgtactacgactattttccggatgcagccaaaatgattccgaaatgtagcacccagctgaaagcagttaccgcacattttcagacccataccaccccgattctgctgagcaataactttattgaaccgctggaaatcaccaaagagatctacgatctgaataacccggaaaaagagccgaaaaaattccagaccgcatatgcaaaaaaaaccggtgatcagaaaggttatcgtgaagcgctgtgtaaatggattgatttcacccgtgattttctgagcaaatacaccaaaaccaccagtatcgatctgagcagcctgcgtccgagcagccagtataaagatctgggcgaatattatgcagaactgaatccgctgctgtatcatattagctttcagcgtattgccgagaaagaaatcatggacgcagttgaaaccggtaaactgtacctgttccagatctacaataaagattttgccaaaggccatcatggcaaaccgaatctgcataccctgtattggaccggtctgtttagccctgaaaatctggcaaaaacctcgattaaactgaatggtcaggcggaactgttttatcgtccgaaaagccgtatgaaacgtatggcacatcgtctgggtgaaaaaatgctgaacaaaaaactgaaagaccagaaaaccccgatcccggatacactgtatcaagaactgtatgattatgtgaaccatcgtctgagccatgatctgagtgatgaagcacgtgccctgctgccgaatgttattaccaaagaagttagccacgagatcattaaagatcgtcgttttaccagcgacaaattcctgtttcatgtgccgattaccctgaattatcaggcagcaaatagcccgagcaaatttaaccagcgtgttaatgcatatctgaaagaacatccagaaacgccgattattggtattgatcgtggtgaacgtaacctgatttatatcaccgttattgatagcaccggcaaaatcctggaacagcgtagcctgaataccattcagcagtttgattaccagaaaaaactggataatcgcgagaaagaacgtgttgcagcacgtcaggcatggtcagttgttggtacaattaaagacctgaaacagggttatctgagccaggttattcatgaaattgtggatctgatgattcactatcaggccgttgttgtgctggaaaacctgaattttggctttaaaagcaaacgtaccggcattgcagaaaaagcagtttatcagcagttcgagaaaatgctgattgacaaactgaattgcctggtgctgaaagattatccggctgaaaaagttggtggtgttctgaatccgtatcagctgaccgatcagtttaccagctttgcaaaaatgggcacccagagcggatttctgttttatgttccggcaccgtatacgagcaaaattgatccgctgaccggttttgttgatccgtttgtttggaaaaccatcaaaaaccatgaaagccgcaaacattttctggaaggtttcgattttctgcattacgacgttaaaacgggtgatttcatcctgcactttaaaatgaatcgcaatctgagttttcagcgtggcctgcctggttttatgcctgcatgggatattgtgtttgagaaaaacgaaacacagttcgatgcaaaaggcaccccgtttattgcaggtaaacgtattgttccggtgattgaaaatcatcgtttcaccggtcgttatcgcgatctgtatccggcaaatgaactgatcgcactgctggaagagaaaggtattgtttttcgtgatggctcaaacattctgccgaaactgctggaaaatgatgatagccatgcaattgataccatggttgcactgattcgtagcgttctgcagatgcgtaatagcaatgcagcaaccggtgaagattacattaatagtccggttcgtgatctgaatggtgtttgttttgatagccgttttcagaatccggaatggccgatggatgcagatgcaaatggtgcatatcatattgcactgaaaggacagctgctgctgaaccacctgaaagaaagcaaagatctgaaactgcaaaacggcattagcaatcaggattggctggcatatatccaagaactgcgtaacggtcgtagcagtgatgatgaagcaaccgcagatagccagcatgcagcaccgcctaaaaagaaacgtaaagtt

SEQ ID NO: 1116 - DNA, 4089 bp, Artificial Sequence
  Cpf1
  misc_feature (3928)..(3993): NLS
  misc_feature (4072)..(4089): His tag
agcacccagtttgaaggtttcaccaatctgtatcaggttagcaaaaccctgcgttttgaactgattccgcagggtaaaaccctgaaacatattcaagaacagggcttcatcgaagaggataaagcacgtaacgatcactacaaagaactgaaaccgattatcgaccgcatctataaaacctatgcagatcagtgtctgcagctggttcagctggattgggaaaatctgagcgcagcaattgatagttatcgcaaagaaaaaaccgaagaaacccgtaatgcactgattgaagaacaggcaacctatcgtaatgccatccatgattatttcattggtcgtaccgataatctgaccgatgcaattaacaaacgtcacgccgaaatctataaaggcctgtttaaagccgaactgtttaatggcaaagttctgaaacagctgggcaccgttaccaccaccgaacatgaaaatgcactgctgcgtagctttgataaattcaccacctatttcagcggcttttatgagaatcgcaaaaacgtgtttagcgcagaagatattagcaccgcaattccgcatcgtattgtgcaggataatttcccgaaattcaaagagaactgccacatttttacccgtctgattaccgcagttccgagcctgcgtgaacattttgaaaacgttaaaaaagccatcggcatctttgttagcaccagcattgaagaagtttttagcttcccgttttacaatcagctgctgacccagacccagattgatctgtataaccaactgctgggtggtattagccgtgaagcaggcaccgaaaaaatcaaaggtctgaatgaagtgctgaatctggccattcagaaaaatgatgaaaccgcacatattattgcaagcctgccgcatcgttttattccgctgttcaaacaaattctgagcgatcgtaataccctgagctttattctggaagaattcaaatccgatgaagaggtgattcagagcttttgcaaatacaaaacgctgctgcgcaatgaaaatgttctggaaactgccgaagcactgtttaacgaactgaatagcattgatctgacccacatctttatcagccacaaaaaactggaaaccatttcaagcgcactgtgtgatcattgggataccctgcgtaatgccctgtatgaacgtcgtattagcgaactgaccggtaaaattaccaaaagcgcgaaagaaaaagttcagcgcagtctgaaacatgaggatattaatctgcaagagattattagcgcagccggtaaagaactgtcagaagcatttaaacagaaaaccagcgaaattctgtcacatgcacatgcagcactggatcagccgctgccgaccaccctgaaaaaacaagaagaaaaagaaatcctgaaaagccagctggatagcctgctgggtctgtatcatctgctggactggtttgcagttgatgaaagcaatgaagttgatccggaatttagcgcacgtctgaccggcattaaactggaaatggaaccgagcctgagcttttataacaaagcccgtaattatgccaccaaaaaaccgtatagcgtcgaaaaattcaaactgaactttcagcgtccgaccctggcaagcggttgggatgttaataaagaaaaaaacaacggtgccatcctgttcgtgaaaaatggcctgtattatctgggtattatgccgaaacagaaaggtcgttataaagcgctgagctttgaaccgacggaaaaaaccagtgaaggttttgataaaatgtactacgactattttccggatgcagccaaaatgattccgaaatgtagcacccagctgaaagcagttaccgcacattttcagacccataccaccccgattctgctgagcaataactttattgaaccgctggaaatcaccaaagagatctacgatctgaataacccggaaaaagagccgaaaaaattccagaccgcatatgcaaaaaaaaccggtgatcagaaaggttatcgtgaagcgctgtgtaaatggattgatttcacccgtgattttctgagcaaatacaccaaaaccaccagtatcgatctgagcagcctgcgtccgagcagccagtataaagatctgggcgaatattatgcagaactgaatccgctgctgtatcatattagctttcagcgtattgccgagaaagaaatcatggacgcagttgaaaccggtaaactgtacctgttccagatctacaataaagattttgccaaaggccatcatggcaaaccgaatctgcataccctgtattggaccggtctgtttagccctgaaaatctggcaaaaacctcgattaaactgaatggtcaggcggaactgttttatcgtccgaaaagccgtatgaaacgtatggcacatcgtctgggtgaaaaaatgctgaacaaaaaactgaaagaccagaaaaccccgatcccggatacactgtatcaagaactgtatgattatgtgaaccatcgtctgagccatgatctgagtgatgaagcacgtgccctgctgccgaatgttattaccaaagaagttagccacgagatcattaaagatcgtcgttttaccagcgacaaattcctgtttcatgtgccgattaccctgaattatcaggcagcaaatagcccgagcaaatttaaccagcgtgttaatgcatatctgaaagaacatccagaaacgccgattattggtattgatcgtggtgaacgtaacctgatttatatcaccgttattgatagcaccggcaaaatcctggaacagcgtagcctgaataccattcagcagtttgattaccagaaaaaactggataatcgcgagaaagaacgtgttgcagcacgtcaggcatggtcagttgttggtacaattaaagacctgaaacagggttatctgagccaggttattcatgaaattgtggatctgatgattcactatcaggccgttgttgtgctggaaaacctgaattttggctttaaaagcaaacgtaccggcattgcagaaaaagcagtttatcagcagttcgagaaaatgctgattgacaaactgaattgcctggtgctgaaagattatccggctgaaaaagttggtggtgttctgaatccgtatcagctgaccgatcagtttaccagctttgcaaaaatgggcacccagagcggatttctgttttatgttccggcaccgtatacgagcaaaattgatccgctgaccggttttgttgatccgtttgtttggaaaaccatcaaaaaccatgaaagccgcaaacattttctggaaggtttcgattttctgcattacgacgttaaaacgggtgatttcatcctgcactttaaaatgaatcgcaatctgagttttcagcgtggcctgcctggttttatgcctgcatgggatattgtgtttgagaaaaacgaaacacagttcgatgcaaaaggcaccccgtttattgcaggtaaacgtattgttccggtgattgaaaatcatcgtttcaccggtcgttatcgcgatctgtatccggcaaatgaactgatcgcactgctggaagagaaaggtattgtttttcgtgatggctcaaacattctgccgaaactgctggaaaatgatgatagccatgcaattgataccatggttgcactgattcgtagcgttctgcagatgcgtaatagcaatgcagcaaccggtgaagattacattaatagtccggttcgtgatctgaatggtgtttgttttgatagccgttttcagaatccggaatggccgatggatgcagatgcaaatggtgcatatcatattgcactgaaaggacagctgctgctgaaccacctgaaagaaagcaaagatctgaaactgcaaaacggcattagcaatcaggattggctggcatatatccaagaactgcgtaacggtcgtagcagtgatgatgaagcaaccgcagatagccagcatgcagcaccgcctaaaaagaaacgtaaagttggtggtagcggtggttcaggtggtagtggcggtagtggtggctcagggggttctggtggctctggtggtagcctcgagcaccaccaccaccaccac

SEQ ID NO: 1117 - DNA, 4083 bp, Artificial Sequence
  Cpf1
  misc_feature (4024)..(4044): NLS
  misc_feature (4066)..(4083): His tag
atgggtcgggatccaggtaaaccgattccgaatccgctgctgggtctggatagcaccgcaccgaaaaaaaaacgtaaagttggtattcatggtgttccggcagcaacccagtttgaaggtttcaccaatctgtatcaggttagcaaaaccctgcgttttgaactgattccgcagggtaaaaccctgaaacatattcaagaacagggcttcatcgaagaggataaagcacgtaacgatcactacaaagaactgaaaccgattatcgaccgcatctataaaacctatgcagatcagtgtctgcagctggttcagctggattgggaaaatctgagcgcagcaattgatagttatcgcaaagaaaaaaccgaagaaacccgtaatgcactgattgaagaacaggcaacctatcgtaatgccatccatgattatttcattggtcgtaccgataatctgaccgatgcaattaacaaacgtcacgccgaaatctataaaggcctgtttaaagccgaactgtttaatggcaaagttctgaaacagctgggcaccgttaccaccaccgaacatgaaaatgcactgctgcgtagctttgataaattcaccacctatttcagcggcttttatgagaatcgcaaaaacgtgtttagcgcagaagatattagcaccgcaattccgcatcgtattgtgcaggataatttcccgaaattcaaagagaactgccacatttttacccgtctgattaccgcagttccgagcctgcgtgaacattttgaaaacgttaaaaaagccatcggcatctttgttagcaccagcattgaagaagtttttagcttcccgttttacaatcagctgctgacccagacccagattgatctgtataaccaactgctgggtggtattagccgtgaagcaggcaccgaaaaaatcaaaggtctgaatgaagtgctgaatctggccattcagaaaaatgatgaaaccgcacatattattgcaagcctgccgcatcgttttattccgctgttcaaacaaattctgagcgatcgtaataccctgagctttattctggaagaattcaaatccgatgaagaggtgattcagagcttttgcaaatacaaaacgctgctgcgcaatgaaaatgttctggaaactgccgaagcactgtttaacgaactgaatagcattgatctgacccacatctttatcagccacaaaaaactggaaaccatttcaagcgcactgtgtgatcattgggataccctgcgtaatgccctgtatgaacgtcgtattagcgaactgaccggtaaaattaccaaaagcgcgaaagaaaaagttcagcgcagtctgaaacatgaggatattaatctgcaagagattattagcgcagccggtaaagaactgtcagaagcatttaaacagaaaaccagcgaaattctgtcacatgcacatgcagcactggatcagccgctgccgaccaccctgaaaaaacaagaagaaaaagaaatcctgaaaagccagctggatagcctgctgggtctgtatcatctgctggactggtttgcagttgatgaaagcaatgaagttgatccggaatttagcgcacgtctgaccggcattaaactggaaatggaaccgagcctgagcttttataacaaagcccgtaattatgccaccaaaaaaccgtatagcgtcgaaaaattcaaactgaactttcagatgccgaccctggcaagcggttgggatgttaataaagaaaaaaacaacggtgccatcctgttcgtgaaaaatggcctgtattatctgggtattatgccgaaacagaaaggtcgttataaagcgctgagctttgaaccgacggaaaaaaccagtgaaggttttgataaaatgtactacgactattttccggatgcagccaaaatgattccgaaatgtagcacccagctgaaagcagttaccgcacattttcagacccataccaccccgattctgctgagcaataactttattgaaccgctggaaatcaccaaagagatctacgatctgaataacccggaaaaagagccgaaaaaattccagaccgcatatgcaaaaaaaaccggtgatcagaaaggttatcgtgaagcgctgtgtaaatggattgatttcacccgtgattttctgagcaaatacaccaaaaccaccagtatcgatctgagcagcctgcgtccgagcagccagtataaagatctgggcgaatattatgcagaactgaatccgctgctgtatcatattagctttcagcgtattgccgagaaagaaatcatggacgcagttgaaaccggtaaactgtacctgttccagatctacaataaagattttgccaaaggccatcatggcaaaccgaatctgcataccctgtattggaccggtctgtttagccctgaaaatctggcaaaaacctcgattaaactgaatggtcaggcggaactgttttatcgtccgaaaagccgtatgaaacgtatggcacatcgtctgggtgaaaaaatgctgaacaaaaaactgaaagaccagaaaaccccgatcccggatacactgtatcaagaactgtatgattatgtgaaccatcgtctgagccatgatctgagtgatgaagcacgtgccctgctgccgaatgttattaccaaagaagttagccacgagatcattaaagatcgtcgttttaccagcgacaaattcttttttcatgtgccgattaccctgaattatcaggcagcaaatagcccgagcaaatttaaccagcgtgttaatgcatatctgaaagaacatccagaaacgccgattattggtattgatcgtggtgaacgtaacctgatttatatcaccgttattgatagcaccggcaaaatcctggaacagcgtagcctgaataccattcagcagtttgattaccagaaaaaactggataatcgcgagaaagaacgtgttgcagcacgtcaggcatggtcagttgttggtacaattaaagacctgaaacagggttatctgagccaggttattcatgaaattgtggatctgatgattcactatcaggccgttgttgtgctggaaaacctgaattttggctttaaaagcaaacgtaccggcattgcagaaaaagcagtttatcagcagttcgagaaaatgctgattgacaaactgaattgcctggtgctgaaagattatccggctgaaaaagttggtggtgttctgaatccgtatcagctgaccgatcagtttaccagctttgcaaaaatgggcacccagagcggatttctgttttatgttccggcaccgtatacgagcaaaattgatccgctgaccggttttgttgatccgtttgtttggaaaaccatcaaaaaccatgaaagccgcaaacattttctggaaggtttcgattttctgcattacgacgttaaaacgggtgatttcatcctgcactttaaaatgaatcgcaatctgagttttcagcgtggcctgcctggttttatgcctgcatgggatattgtgtttgagaaaaacgaaacacagttcgatgcaaaaggcaccccgtttattgcaggtaaacgtattgttccggtgattgaaaatcatcgtttcaccggtcgttatcgcgatctgtatccggcaaatgaactgatcgcactgctggaagagaaaggtattgtttttcgtgatggctcaaacattctgccgaaactgctggaaaatgatgatagccatgcaattgataccatggttgcactgattcgtagcgttctgcagatgcgtaatagcaatgcagcaaccggtgaagattacattaatagtccggttcgtgatctgaatggtgtttgttttgatagccgttttcagaatccggaatggccgatggatgcagatgcaaatggtgcatatcatattgcactgaaaggacagctgctgctgaaccacctgaaagaaagcaaagatctgaaactgcaaaacggcattagcaatcaggattggctggcatatatccaagaactgcgtaaccctaaaaaaaaacgcaaagtgaagcttgcggccgcactcgagcaccaccaccaccaccac

SEQ ID NO: 1118 - DNA, 304 bp, Homo sapiens
tcctaaagcttggaacactttcccttccttaagaaccatccttgctactcagctgcaatcaatccagcccccaggtcttcactgaaccttttcccatctcttccaaaacatctgtttctgagaagtcctgtcctatagaggtctttcttcccaccggatttctcctacaccatttactcccacttgcagaactcccgtgtacaagtgtctttactgcttttatttgctcatcaaaatgcacatctcatataaaaataaatgaggagcatgcacacaccacaaacacaaacaggcatgcagaaat

SEQ ID NO: 1119 - DNA, 665 bp, Homo sapiens
ataaagatgaacccatagtgagctgagagctccagcctggcctccagataactacacaccaagcttccacccagaatcaagcctatgttaacttccctcaaagcctgagattttgccttcccattaaatgcaggtagttgttccccttcaagcactagtcactggccataatttaaatcttgctatcttcttgccaccatgaaccctgtatgttgtaggctgaagacgttaaaagaaacacacgctgacacacacacacacacgcgcgcgcgcacacacacacacacacacagagctgactttcaaaatctactccagcccaaatgtttcaattgttcctcacccctggacatactttgcccccatctggaattaaaggatataagtttgtaatgaagcattagcagcattttatatgtgtccagctgatataggaatagccttagcaatgtatgtttggccaccaaagttccccactttgactgagccaatatatgccttctgcctgcatctttttaacgaccatacttgtcctgcctccagatagatgttttaaaacaacaaaaatgagggaaagatgaaagttctttctactggaatctaataaagaaaagtcattttcctcatttccacctctcttttctcaaagtcaaaattgtccatct

SEQ ID NO: 1120 - DNA, 165 bp, Homo sapiens
ccctaaaacattaccactgggtctcagcccagttagtcctctgcagtttcttcacccccaaccccagtatcttcaaacagctcacaccctgctgtgctcagatcaatactccgttgtctaagttgcctcgagactaaaggcaacagggctgaaacatctcctgga

SEQ ID NO: 1121 - DNA, 122 bp, Homo sapiens
ctgtgagattgacaagaacagtttgacagtcagaaggtgccacaaatcctgagaagcgacctggacttttgccaggcacagggtccttccttccctcccttgtcctggtcaccagagcctac

SEQ ID NO: 1122 - DNA, 24 bp, Homo sapiens
gccgccggcccctggcctcactgg

SEQ ID NO: 1123 - DNA, 33 bp, Homo sapiens
ccttgtcaaggctattggtcaaggcaaggctgg

SEQ ID NO: 1124 - DNA, 36 bp, Homo sapiens
tgagatagtgtggggaaggggcccccaagaggatac

SEQ ID NO: 1125 - DNA, 41 bp, Homo sapiens
tatagcctttgccttgttccgattcagtcattccagttttt

SEQ ID NO: 1126 - DNA, 114 bp, Homo sapiens
tcttccctttagctagtttccttctcccatcatagaggataccaggacttcttttgtcagccgttttttaccttcttgtctctagctccagtgaggcctgtagtttaaagctaa

SEQ ID NO: 1127 - DNA, 86 bp, Homo sapiens
ccacagtttcagcgcagtaatagattagtgttacataatataagacctaatgcttacctcaatatctacttatccgtacctatttg

SEQ ID NO: 1128 - DNA, 142 bp, Homo sapiens
tattcaggtatgtatgtatacaccagatgatgtgtatttaccactggataagtgtgtgtgctggctgatgacccagggttttggcgtagctcttctatgctcagtaaagatgatggtagaatgttctttggcaggtactgtg

SEQ ID NO: 1129 - DNA, 697 bp, Homo sapiens
caataaagatgaacccatagtgagctgagagctccagcctggcctccagataactacacaccaagcttccacccagaatcaagcctatgttaacttccctcaaagcctgagattttgctttcccattaaatgcaggtagttgttcttcttgcagcactagtcactggccataatttaaatcttgttatcttcttgccaccatgaaccctgtatgctgtaggctgaaaacgttaaaagaaacacacgctctcacacacacacaaacacacgcgcgcacacacacacacacacacacagagctgactttcaaaatctactccagcccaaatgtttcaattgttcctcacccctggacatactttgcccccatctggaattaaaggatataagtttgtaatgaagcattagcagcattttatatgtgtccagctgatataggaatagccttagcaatgtatgtttggccaccaaagttccccactttgactgagccaatatatgccttctgcctgcatctttttaatgaccatacttgtcctgcctccagatagatgttttaaaacgaataacaaaaataggggaaaggtgaaagttctttctaccgaaatctaataaagaaaagtcattttcctcatttccacctctcttttctcaaagtcaaagttgtccatctagattttcagaggcactccttagg

SEQ ID NO: 1130 - DNA, 185 bp, Homo sapiens
ccctaaaacattgccactgggtctcagcccagttagtcctctgcagtttcttcactcccaaccccagtatcttcaaacagctcacaccctgctgtgctcagatcaatactcagttgtctaagttgcctcgagactaaaggcaacagtgctgaaacatctcctggactcaccttgaagttctcagg

SEQ ID NO: 1131 - DNA, 137 bp, Homo sapiens
agcctgtgagattgacaagaacagtttgacagtcagaaggtgccacaaatcctgagaagcgacctggacttttgccaggcacagggtccttccttccctcccttgtcctggtcaccagagcctaccttcccagggtt

SEQ ID NO: 1132 - DNA, 38 bp, Homo sapiens
ccgccggcccctggcctcactggatactctaagactat

SEQ ID NO: 1133 - DNA, 31 bp, Homo sapiens
ccttgtcaaggctattggtcaaggcaaggct

SEQ ID NO: 1134 - DNA, 75 bp, Homo sapiens
cagggaccgtttcagacagatatttgcattgagatagtgtggggaaggggcccccaagaggatactgctgcttaa

SEQ ID NO: 1135 - DNA, 29 bp, Homo sapiens
ttgccttgttccgattcagtcattccaat

SEQ ID NO: 1136 - DNA, 104 bp, Homo sapiens
tttagctagttttcttctcccaccatagaagataccaggacttcttttgtcagccgtttttcaccttcttgtctgtagctccagtgaggcctgtagtttaaagt

SEQ ID NO: 1137 - DNA, 38 bp, Homo sapiens
ggacacgtcttagtctcatttagtaagcattggtttcc

SEQ ID NO: 1138 - DNA, 124 bp, Homo sapiens
ttttttatattcaggtatgtatgtaggcacccgatgatgtgtatttatcactggataagtgtatgtgctggctgatgacccagggttttggtgtagctcttctatgctcggtaaagatgatggt

SEQ ID NO: 1139 - RNA, 20 nt, Artificial Sequence
  gRNA targeting domain - AsCpf1 HBG1 Promoter-1
agacagauauuugcauugag

SEQ ID NO: 1140 - DNA, 20 bp, Artificial Sequence
  gRNA targeting domain - AsCpf1 HBG1 Promoter-1
agacagatatttgcattgag

SEQ ID NO: 1141 - RNA, 20 nt, Artificial Sequence
  gRNA targeting domain - AsCpf1 HBG1 Promoter-2
cauugagauaguguggggaa

SEQ ID NO: 1142 - DNA, 20 bp, Artificial Sequence
  gRNA targeting domain - AsCpf1 HBG1 Promoter-2
cattgagatagtgtggggaa

SEQ ID NO: 1143 - RNA, 20 nt, Artificial Sequence
  gRNA targeting domain - AsCpf1 HBG1 Promoter-3
uagccuuugccuuguuccga

SEQ ID NO: 1144 - DNA, 20 bp, Artificial Sequence
  gRNA targeting domain - AsCpf1 HBG1 Promoter-3
tagcctttgccttgttccga

SEQ ID NO: 1145 - RNA, 20 nt, Artificial Sequence
  gRNA targeting domain - AsCpf1 HBG1 Promoter-4
ccuuguuccgauucagucau

SEQ ID NO: 1146 - DNA, 20 bp, Artificial Sequence
  gRNA targeting domain - AsCpf1 HBG1 Promoter-4
ccttgttccgattcagtcat

SEQ ID NO: 1147 - RNA, 20 nt, Artificial Sequence
  gRNA targeting domain - AsCpf1 HBG1 Promoter-5
ucuaauuuauucuucccuuu

SEQ ID NO: 1148 - DNA, 20 bp, Artificial Sequence
  gRNA targeting domain - AsCpf1 HBG1 Promoter-5
tctaatttattcttcccttt

SEQ ID NO: 1149 - RNA, 20 nt, Artificial Sequence
  gRNA targeting domain - AsCpf1 HBG1 Promoter-6
cuucucccaucauagaggau

SEQ ID NO: 1150 - DNA, 20 bp, Artificial Sequence
  gRNA targeting domain - AsCpf1 HBG1 Promoter-6
cttctcccatcatagaggat

SEQ ID NO: 1151 - RNA, 20 nt, Artificial Sequence
  gRNA targeting domain - AsCpf1 HBG2 Promoter-7
uucucccaccauagaagaua

SEQ ID NO: 1152 - DNA, 20 bp, Artificial Sequence
  gRNA targeting domain - AsCpf1 HBG2 Promoter-7
ttctcccaccatagaagata

SEQ ID NO: 1153 - RNA, 20 nt, Artificial Sequence
  gRNA targeting domain - AsCpf1 HBG1 Promoter-8
ccacuggauaagugugugug

SEQ ID NO: 1154 - DNA, 20 bp, Artificial Sequence
  gRNA targeting domain - AsCpf1 HBG1 Promoter-8
ccactggataagtgtgtgtg

SEQ ID NO: 1155 - RNA, 20 nt, Artificial Sequence
  gRNA targeting domain - AsCpf1 HBG1 Promoter-9
gcguagcucuucuaugcuca

SEQ ID NO: 1156 - DNA, 20 bp, Artificial Sequence
  gRNA targeting domain - AsCpf1 HBG1 Promoter-9
gcgtagctcttctatgctca

SEQ ID NO: 1157 - RNA, 20 nt, Artificial Sequence
  gRNA targeting domain - AsCpf1 HBG1 Promoter-10
cugagcauagaagagcuacg

SEQ ID NO: 1158 - DNA, 20 bp, Artificial Sequence
  gRNA targeting domain - AsCpf1 HBG1 Promoter-10
ctgagcatagaagagctacg

SEQ ID NO: 1159 - RNA, 20 nt, Artificial Sequence
  gRNA targeting domain - AsCpf1 HBG2 Promoter-11
ucacuggauaaguguaugug

SEQ ID NO: 1160 - DNA, 20 bp, Artificial Sequence
  gRNA targeting domain - AsCpf1 HBG2 Promoter-11
tcactggataagtgtatgtg

SEQ ID NO: 1161 - RNA, 20 nt, Artificial Sequence
  gRNA targeting domain - AsCpf1 HBG2 Promoter-12
guguagcucuucuaugcucg

SEQ ID NO: 1162 - DNA, 20 bp, Artificial Sequence
  gRNA targeting domain - AsCpf1 HBG2 Promoter-12
gtgtagctcttctatgctcg

SEQ ID NO: 1163 - RNA, 20 nt, Artificial Sequence
  gRNA targeting domain - AsCpf1 HBG2 Promoter-13
ccgagcauagaagagcuaca

SEQ ID NO: 1164 - DNA, 20 bp, Artificial Sequence
  gRNA targeting domain - AsCpf1 HBG2 Promoter-13
ccgagcatagaagagctaca

SEQ ID NO: 1165-1166 - skipped (2 entries)

SEQ ID NO: 1167 - RNA, 20 nt, Artificial Sequence
  gRNA targeting domain - AsCpf1 RR HBG1 Promoter-1
gacagauauuugcauugaga

SEQ ID NO: 1168 - DNA, 20 bp, Artificial Sequence
  gRNA targeting domain - AsCpf1 RR HBG1 Promoter-1
gacagatatttgcattgaga

SEQ ID NO: 1169 - RNA, 20 nt, Artificial Sequence
  gRNA targeting domain - AsCpf1 RR HBG1 Promoter-2
acacuaucucaaugcaaaua

SEQ ID NO: 1170 - DNA, 20 bp, Artificial Sequence
  gRNA targeting domain - AsCpf1 RR HBG1 Promoter-2
acactatctcaatgcaaata

SEQ ID NO: 1171 - RNA, 20 nt, Artificial Sequence
  gRNA targeting domain - AsCpf1 RR HBG1 Promoter-3
cacacuaucucaaugcaaau

SEQ ID NO: 1172 - DNA, 20 bp, Artificial Sequence
  gRNA targeting domain - AsCpf1 RR HBG1 Promoter-3
cacactatctcaatgcaaat

SEQ ID NO: 1173 - RNA, 20 nt, Artificial Sequence
  gRNA targeting domain - AsCpf1 RR HBG1 Promoter-4
ccacacuaucucaaugcaaa

SEQ ID NO: 1174 - DNA, 20 bp, Artificial Sequence
  gRNA targeting domain - AsCpf1 RR HBG1 Promoter-4
ccacactatctcaatgcaaa

SEQ ID NO: 1175 - RNA, 20 nt, Artificial Sequence
  gRNA targeting domain - AsCpf1 RR HBG1 Promoter-5
uuccccacacuaucucaaug

SEQ ID NO: 1176 - DNA, 20 bp, Artificial Sequence
  gRNA targeting domain - AsCpf1 RR HBG1 Promoter-5
ttccccacactatctcaatg

SEQ ID NO: 1177 - RNA, 20 nt, Artificial Sequence
  gRNA targeting domain - AsCpf1 RR HBG1 Promoter-6
gauucagucauuccaguuuu

SEQ ID NO: 1178 - DNA, 20 bp, Artificial Sequence
  gRNA targeting domain - AsCpf1 RR HBG1 Promoter-6
gattcagtcattccagtttt

SEQ ID NO: 1179 - RNA, 20 nt, Artificial Sequence
  gRNA targeting domain - AsCpf1 RR HBG1 Promoter-7
auucagucauuccaguuuuu

SEQ ID NO: 1180 - DNA, 20 bp, Artificial Sequence
  gRNA targeting domain - AsCpf1 RR HBG1 Promoter-7
attcagtcattccagttttt

SEQ ID NO: 1181 - RNA, 20 nt, Artificial Sequence
  gRNA targeting domain - AsCpf1 RR HBG1 Promoter-8
gucauuccaguuuuucucua

SEQ ID NO: 1182 - DNA, 20 bp, Artificial Sequence
  gRNA targeting domain - AsCpf1 RR HBG1 Promoter-8
gtcattccagtttttctcta

SEQ ID NO: 1183 - RNA, 20 nt, Artificial Sequence
  gRNA targeting domain - AsCpf1 RR HBG1 Promoter-9
aguuuuucucuaauuuauuc

SEQ ID NO: 1184 - DNA, 20 bp, Artificial Sequence
  gRNA targeting domain - AsCpf1 RR HBG1 Promoter-9
agtttttctctaatttattc

SEQ ID NO: 1185 - RNA, 20 nt, Artificial Sequence
  gRNA targeting domain - AsCpf1 RR HBG1 Promoter-10
guuuuucucuaauuuauucu

SEQ ID NO: 1186 - DNA, 20 bp, Artificial Sequence
  gRNA targeting domain - AsCpf1 RR HBG1 Promoter-10
gtttttctctaatttattct

SEQ ID NO: 1187 - RNA, 20 nt, Artificial Sequence
  gRNA targeting domain - AsCpf1 RR HBG2 Promoter-11
gauucagucauuccaauuuu

SEQ ID NO: 1188 - DNA, 20 bp, Artificial Sequence
  gRNA targeting domain - AsCpf1 RR HBG2 Promoter-11
caagaggatactgctgctta

SEQ ID NO: 1189 - RNA, 20 nt, Artificial Sequence
  gRNA targeting domain - AsCpf1 RR HBG2 Promoter-12
auucagucauuccaauuuuu

SEQ ID NO: 1190 - DNA, 20 bp, Artificial Sequence
  gRNA targeting domain - AsCpf1 RR HBG2 Promoter-12
aagaggatactgctgcttaa

SEQ ID NO: 1191 - RNA, 20 nt, Artificial Sequence
  gRNA targeting domain - AsCpf1 RR HBG2 Promoter-13
gucauuccaauuuuucucua

SEQ ID NO: 1192 - DNA, 20 bp, Artificial Sequence
  gRNA targeting domain - AsCpf1 RR HBG2 Promoter-13
gattcagtcattccaatttt

SEQ ID NO: 1193 - RNA, 20 nt, Artificial Sequence
  gRNA targeting domain - AsCpf1 RR HBG2 Promoter-14
aauuuuucucuaauuuauuc

SEQ ID NO: 1194 - DNA, 20 bp, Artificial Sequence
  gRNA targeting domain - AsCpf1 RR HBG2 Promoter-14
attcagtcattccaattttt

SEQ ID NO: 1195 - RNA, 20 nt, Artificial Sequence
  gRNA targeting domain - AsCpf1 RR HBG2 Promoter-15
auuuuucucuaauuuauucu

SEQ ID NO: 1196 - DNA, 20 bp, Artificial Sequence
  gRNA targeting domain - AsCpf1 RR HBG2 Promoter-15
gtcattccaatttttctcta

SEQ ID NO: 1197 - RNA, 20 nt, Artificial Sequence
  gRNA targeting domain - AsCpf1 RR HBG2 Promoter-16
uucucccaucauagaggaua

SEQ ID NO: 1198 - DNA, 20 bp, Artificial Sequence
  gRNA targeting domain - AsCpf1 RR HBG2 Promoter-16
aatttttctctaatttattc

SEQ ID NO: 1199 - RNA, 20 nt, Artificial Sequence
  gRNA targeting domain - AsCpf1 RR HBG2 Promoter-17
aucauagaggauaccaggac

SEQ ID NO: 1200 - DNA, 20 bp, Artificial Sequence
  gRNA targeting domain - AsCpf1 RR HBG2 Promoter-17
atttttctctaatttattct

SEQ ID NO: 1201 - RNA, 20 nt, Artificial Sequence
  gRNA targeting domain - AsCpf1 RR HBG1 Promoter-18
accauagaagauaccaggac

SEQ ID NO: 1202 - DNA, 20 bp, Artificial Sequence
  gRNA targeting domain - AsCpf1 RR HBG1 Promoter-18
ttctcccatcatagaggata

SEQ ID NO: 1203 - RNA, 20 nt, Artificial Sequence
  gRNA targeting domain - AsCpf1 RR HBG1 Promoter-19
caguaccugccaaagaacau

SEQ ID NO: 1204 - DNA, 20 bp, Artificial Sequence
  gRNA targeting domain - AsCpf1 RR HBG1 Promoter-19
atcatagaggataccaggac

SEQ ID NO: 1205 - RNA, 20 nt, Artificial Sequence
  gRNA targeting domain - AsCpf1 RR HBG2 Promoter-20
uaguaucugguaaagagcau

SEQ ID NO: 1206 - DNA, 20 bp, Artificial Sequence
  gRNA targeting domain - AsCpf1 RR HBG2 Promoter-20
accatagaagataccaggac

SEQ ID NO: 1207 - RNA, 20 nt, Artificial Sequence
  gRNA targeting domain - AsCpf1 RR HBG1 Promoter-21
ucaaugcaaauaucugucug

SEQ ID NO: 1208 - DNA, 20 bp, Artificial Sequence
  gRNA targeting domain - AsCpf1 RR HBG1 Promoter-21
cagtacctgccaaagaacat

SEQ ID NO: 1209 - RNA, 20 nt, Artificial Sequence
  gRNA targeting domain - AsCpf1 RR HBG2 Promoter-22
cucuugggggccccuucccc

SEQ ID NO: 1210 - DNA, 20 bp, Artificial Sequence
  gRNA targeting domain - AsCpf1 RR HBG2 Promoter-22
tagtatctggtaaagagcat

SEQ ID NO: 1211 - RNA, 20 nt, Artificial Sequence
  gRNA targeting domain - AsCpf1 RVR HBG1 Promoter-1
gauucagucauuccaauuuu

SEQ ID NO: 1212 - DNA, 20 bp, Artificial Sequence
  gRNA targeting domain - AsCpf1 RVR HBG1 Promoter-1
tcaatgcaaatatctgtctg

SEQ ID NO: 1213 - RNA, 20 nt, Artificial Sequence
  gRNA targeting domain - AsCpf1 RVR HBG1 Promoter-2
auucagucauuccaauuuuu

SEQ ID NO: 1214 - DNA, 20 bp, Artificial Sequence
  gRNA targeting domain - AsCpf1 RVR HBG1 Promoter-2
ctcttgggggccccttcccc

SEQ ID NO: 1215 - RNA, 20 nt, Artificial Sequence
  gRNA targeting domain - AsCpf1 RVR HBG1 Promoter-3
aaaaaaauuagcaguauccu

SEQ ID NO: 1216 - DNA, 20 bp, Artificial Sequence
  gRNA targeting domain - AsCpf1 RVR HBG1 Promoter-3
aaaaaaattagcagtatcct

SEQ ID NO: 1217 - RNA, 20 nt, Artificial Sequence
  gRNA targeting domain - AsCpf1 RVR HBG1 Promoter-4
gccuuugccuuguuccgauu

SEQ ID NO: 1218 - DNA, 20 bp, Artificial Sequence
  gRNA targeting domain - AsCpf1 RVR HBG1 Promoter-4
gcctttgccttgttccgatt

SEQ ID NO: 1219 - RNA, 20 nt, Artificial Sequence
  gRNA targeting domain - AsCpf1 RVR HBG2 Promoter-5
aaaaaaauuaagcagcagua

SEQ ID NO: 1220 - DNA, 20 bp, Artificial Sequence
  gRNA targeting domain - AsCpf1 RVR HBG2 Promoter-5
aaaaaaattaagcagcagta

SEQ ID NO: 1221 - RNA, 20 nt, Artificial Sequence
  gRNA targeting domain - AsCpf1 RVR HBG1 Promoter-6
cucaguaaagaugaugguag

SEQ ID NO: 1222 - DNA, 20 bp, Artificial Sequence
  gRNA targeting domain - AsCpf1 RVR HBG1 Promoter-6
ctcagtaaagatgatggtag

SEQ ID NO: 1223 - RNA, 20 nt, Artificial Sequence
  gRNA targeting domain - AsCpf1 RVR HBG2 Promoter-7
acuggauaaguguaugugcu

SEQ ID NO: 1224 - DNA, 20 bp, Artificial Sequence
  gRNA targeting domain - AsCpf1 RVR HBG2 Promoter-7
actggataagtgtatgtgct

SEQ ID NO: 1225 - RNA, 20 nt, Artificial Sequence
  gRNA targeting domain - AsCpf1 RVR HBG2 Promoter-8
ugcuggcugaugacccaggg

SEQ ID NO: 1226 - DNA, 20 bp, Artificial Sequence
  gRNA targeting domain - AsCpf1 RVR HBG2 Promoter-8
tgctggctgatgacccaggg

SEQ ID NO: 1227 - RNA, 20 nt, Artificial Sequence
  gRNA targeting domain - AsCpf1 RVR HBG2 Promoter-9
cucgguaaagaugaugguag

SEQ ID NO: 1228 - DNA, 20 bp, Artificial Sequence
  gRNA targeting domain - AsCpf1 RVR HBG2 Promoter-9
ctcggtaaagatgatggtag

SEQ ID NO: 1229 - RNA, 20 nt, Artificial Sequence
  gRNA targeting domain - AsCpf1 RVR HBG2 Promoter-10
ugguaaagagcauucuacca

SEQ ID NO: 1230 - DNA, 20 bp, Artificial Sequence
  gRNA targeting domain - AsCpf1 RVR HBG2 Promoter-10
tggtaaagagcattctacca

SEQ ID NO: 1231 - RNA, 5 nt, Artificial Sequence
  +5 RNA gRNA 5' extension
cuuuu

SEQ ID NO: 1232 - RNA, 10 nt, Artificial Sequence
  +10 RNA gRNA 5' extension
aagaccuuuu

SEQ ID NO: 1233 - RNA, 25 nt, Artificial Sequence
  +25 RNA gRNA 5' extension
auguguuuuugucaaaagaccuuuu

SEQ ID NO: 1234 - RNA, 60 nt, Artificial Sequence
  +60 RNA gRNA 5' extension
aggccagcuugccgguuuuuuagucgugcugcuucauguguuuuugucaaaagaccuuuu

SEQ ID NO: 1235 - DNA, 5 bp, Artificial Sequence
  +5 DNA gRNA 5' extension
ctttt

SEQ ID NO: 1236 - DNA, 10 bp, Artificial Sequence
  +10 DNA gRNA 5' extension
aagacctttt

SEQ ID NO: 1237 - DNA, 25 bp, Artificial Sequence
  +25 DNA gRNA 5' extension
atgtgtttttgtcaaaagacctttt

SEQ ID NO: 1238 - DNA, 60 bp, Artificial Sequence
  +60 DNA gRNA 5' extension
aggccagcttgccggttttttagtcgtgctgcttcatgtgtttttgtcaaaagacctttt

SEQ ID NO: 1239 - DNA, 20 bp, Artificial Sequence
  +20 DNA gRNA 5' extension
tttttgtcaaaagacctttt

SEQ ID NO: 1240 - DNA, 30 bp, Artificial Sequence
  +30 DNA gRNA 5' extension
gcttcatgtgtttttgtcaaaagacctttt

SEQ ID NO: 1241 - DNA, 50 bp, Artificial Sequence
  +50 DNA gRNA 5' extension
gccggttttttagtcgtgctgcttcatgtgtttttgtcaaaagacctttt

SEQ ID NO: 1242 - DNA, 40 bp, Artificial Sequence
  +40 DNA gRNA 5' extension
tagtcgtgctgcttcatgtgtttttgtcaaaagacctttt

SEQ ID NO: 1243 - DNA, 20 bp, Artificial Sequence
  +20 DNA/2xPS gRNA 5' extension
  misc_feature (1)..(2): Linked by phosphorothioate (PS) bond
  misc_feature (2)..(3): Linked by phosphorothioate (PS) bond
ccgaagttttcttcggtttt

SEQ ID NO: 1244 - DNA, 25 bp, Artificial Sequence
  +25 DNA/2xPS gRNA 5' extension
  misc_feature (1)..(2): Linked by phosphorothioate (PS) bond
  misc_feature (2)..(3): Linked by phosphorothioate (PS) bond
tttttccgaagttttcttcggtttt

SEQ ID NO: 1245 - DNA, 30 bp, Artificial Sequence
  +30 DNA/2xPS gRNA 5' extension
  misc_feature (1)..(2): Linked by phosphorothioate (PS) bond
  misc_feature (2)..(3): Linked by phosphorothioate (PS) bond
aacgctttttccgaagttttcttcggtttt

SEQ ID NO: 1246 - DNA, 41 bp, Artificial Sequence
  +41 DNA/2xPS gRNA 5' extension
  misc_feature (1)..(2): Linked by phosphorothioate (PS) bond
  misc_feature (2)..(3): Linked by phosphorothioate (PS) bond
gcgttgttttcaacgctttttccgaagttttcttcggtttt

SEQ ID NO: 1247 - DNA, 62 bp, Artificial Sequence
  +62 DNA/2xPS gRNA 5' extension
  misc_feature (1)..(2): Linked by phosphorothioate (PS) bond
  misc_feature (2)..(3): Linked by phosphorothioate (PS) bond
ggcttcttttgaagcctttttgcgttgttttcaacgctttttccgaagttttcttcggtttt

SEQ ID NO: 1248 - DNA, 25 bp, Artificial Sequence
  +25 DNA/2xPS gRNA 5' extension
  misc_feature (1)..(2): Linked by phosphorothioate (PS) bond
  misc_feature (2)..(3): Linked by phosphorothioate (PS) bond
atgtgtttttgtcaaaagacctttt

SEQ ID NO: 1249 - DNA, 25 bp, Artificial Sequence
  +25 A gRNA 5' extension
aaaaaaaaaaaaaaaaaaaaaaaaa

SEQ ID NO: 1250 - DNA, 25 bp, Artificial Sequence
  +25 T gRNA 5' extension
ttttttttttttttttttttttttt

SEQ ID NO: 1251 - RNA, 25 nt, Artificial Sequence
  +25 RNA/2xPS gRNA 5' extension
  misc_feature (1)..(2): Linked by phosphorothioate (PS) bond
  misc_feature (1)..(1): Modified to contain 2'-O-methyl
  misc_feature (2)..(2): Modified to contain 2'-O-methyl
  misc_feature (2)..(3): Linked by phosphorothioate (PS) bond
auguguuuuugucaaaagaccuuuu

SEQ ID NO: 1252 - RNA, 25 nt, Artificial Sequence
  +25 polyA RNA/2xPS gRNA 5' extension
  misc_feature (1)..(2): Linked by phosphorothioate (PS) bond
  misc_feature (1)..(1): Modified to contain 2'-O-methyl
  misc_feature (2)..(2): Modified to contain 2'-O-methyl
  misc_feature (2)..(3): Linked by phosphorothioate (PS) bond
aaaaaaaaaaaaaaaaaaaaaaaaa

SEQ ID NO: 1253 - RNA, 25 nt, Artificial Sequence
  +25 polyU RNA/2xPS gRNA 5' extension
  misc_feature (1)..(2): Linked by phosphorothioate (PS) bond
  misc_feature (1)..(1): Modified to contain 2'-O-methyl
  misc_feature (2)..(2): Modified to contain 2'-O-methyl
  misc_feature (2)..(3): Linked by phosphorothioate (PS) bond
uuuuuuuuuuuuuuuuuuuuuuuuu

SEQ ID NO: 1254 - RNA, 21 nt, Artificial Sequence
  HBG1-1 21mer targeting domain
ccuugucaaggcuauugguca

SEQ ID NO: 1255 - DNA, 21 bp, Artificial Sequence
  HBG1-1 21mer targeting domain
ccttgtcaaggctattggtca

SEQ ID NO: 1256 - RNA, 22 nt, Artificial Sequence
  HBG1-1 22mer targeting domain
ccuugucaaggcuauuggucaa

SEQ ID NO: 1257 - DNA, 22 bp, Artificial Sequence
  HBG1-1 22mer targeting domain
ccttgtcaaggctattggtcaa

SEQ ID NO: 1258 - RNA, 23 nt, Artificial Sequence
  HBG1-1 23mer targeting domain
ccuugucaaggcuauuggucaag

SEQ ID NO: 1259 - DNA, 23 bp, Artificial Sequence
  HBG1-1 23mer targeting domain
ccttgtcaaggctattggtcaag

SEQ ID NO: 1260 - RNA, 21 nt, Artificial Sequence
  AsCpf1 HBG1 promoter-1 21mer targeting domain
agacagauauuugcauugaga

SEQ ID NO: 1261 - DNA, 21 bp, Artificial Sequence
  AsCpf1 HBG1 promoter-1 21mer targeting domain
agacagatatttgcattgaga

SEQ ID NO: 1262 - RNA, 21 nt, Artificial Sequence
  AsCpf1 HBG1 promoter-2 21mer targeting domain
cauugagauaguguggggaag

SEQ ID NO: 1263 - DNA, 21 bp, Artificial Sequence
  AsCpf1 HBG1 promoter-2 21mer targeting domain
cattgagatagtgtggggaag

SEQ ID NO: 1264 - RNA, 21 nt, Artificial Sequence
  AsCpf1 HBG1 promoter-6 21mer targeting domain
cuucucccaucauagaggaua

SEQ ID NO: 1265 - DNA, 21 bp, Artificial Sequence
  AsCpf1 HBG1 promoter-6 21mer targeting domain
cttctcccatcatagaggata

SEQ ID NO: 1266 - DNA, 20 bp, Artificial Sequence
  Forward primer
catggcgtctggactaggag

SEQ ID NO: 1267 - DNA, 24 bp, Artificial Sequence
  Reverse primer
aaacacatttcacaatccctgaac

SEQ ID NO: 1268 - DNA, 53 bp, Artificial Sequence
  OLI13753 forward primer
acactctttccctacacgacgctcttccgatctcatggcgtctggactaggag

SEQ ID NO: 1269 - DNA, 58 bp, Artificial Sequence
  OLI13752 reverse primer
gtgactggagttcagacgtgtgctcttccgatctaaacacatttcacaatccctgaac

SEQ ID NO: 1270 - DNA, 499 bp, Artificial Sequence
  AMP3322
catggcgtctggactaggagcttattgataacctcagacgttccagaagcgagtgtgtggaactgctgaagggtgcttccttttattcttcatccctagccagccgccggcccctggcctcactggatactctaagactattggtcaagtttgccttgtcaaggctattggtcaaggcaaggctggccaacccatgggtggagtttagccagggaccgtttcagacagatatttgcattgagatagtgtggggaaggggcccccaagaggatactgctaattttttttatagcctttgccttgttccgattcagtcattccagtttttctctaatttattcttccctttagctagtttccttctcccatcatagaggataccaggacttcttttgtcagccgttttttaccttcttgtctctagctccagtgaggcctgtagtttaaagctaaagcatgtaccaatttttgaaaagttcagggattgtgaaatgtgttt

SEQ ID NO: 1271 - DNA, 25 bp, Artificial Sequence
  AD-P-6 ddPCR Assay6
tccctgatgaacatagatgccaaca

SEQ ID NO: 1272 - DNA, 21 bp, Artificial Sequence
  AD33 ddPCT Assay6
actgggaaagaacataaccaa

SEQ ID NO: 1273 - DNA, 22 bp, Artificial Sequence
  AD34 ddPCT Assay6
gatatgctgtcggatgctatta

SEQ ID NO: 1274 - DNA, 26 bp, Artificial Sequence
  AD-P-9 ddPCT Assay9
agaatgttctttggcaggtactgtgg

SEQ ID NO: 1275 - DNA, 20 bp, Artificial Sequence
  AD95 ddPCT Assay9
cgtagctcttctatgctcag

SEQ ID NO: 1276 - DNA, 18 bp, Artificial Sequence
  AD96 ddPCT Assay9
ccatgtacacgcacatct
